United States Patent Application Publication US 2013/0034624 A1 - sequence listing, part 23

SEQ ID NO: 63659 - DNA, 2743 bp, Bovine  19866880808804
  misc_feature (1)..(1): n is a, c, g, or t
ntaatacataaagcaaaagattttacagtacagacttctagaatctctataagacatttgctccagaaaccaatcaagctccttccacaaaggccctccatcttgttctcggttacctatgaaagccatagcttggtcttttgggtaaaaaatgataagttcctaatcagtcttggtccattcattttggcttttggttggaagagactctaacttaaacaagaaagaaatttatcaaagggatgtgggggaggtcacaaaattgggttggaagctggagttttcacaaggacaggaagcaggacagatgcataagcaccaagagccaatagacggattttgctccaaccattttctatctttttgttcttctcagaaaactcaatcagggacagaagttgtgattggcccaacttggttcacaggcccacatgctgatcagggaaggacgggcaccctgatgggttgtctcaacaaggcggtgtttgatagaatagtggctcccccacagacaaactggttctgttactgggctccaccagcacaaatgctgagggaaagacaccaaatatgtcccatctatttgatgaccactcattcacgccttctcccctctttcccatgtgcctatgcatacctagacaggagagagaccagccaacccagccctgtggtgggtgaatggcaaaggggatgaggtgaaatggagctttggagaactgggctccttgtcccgaaaggctgccaatgtgctcaccaagccctgtggtttagagagaggagaccgagtggccgtgattcttccccgaatcccagagtggtggcttataaacgtggcttgtatgagaacaggtcagtgccaatatttaacatttctaaatcatgcagaaacagaaaaagactgaaagtagaggtttttctgaattgttagtcctgactgaagttatgcttacaaagaacagaaaaactgggttgaaattagaagcagtcatgatgcaataataaaacactacctcaagaggtaagtattattgatgcgatgcccattttgtgagaaaggaaactgatgttcagaaaggttaaatttgcccagagtcacacagctagaaagctatgcaattggagcttaaacacaaaactctataaaagcaaatgtgggtaccaatacctctttgcagtgctggttatgatgtgttcatccagatgctccagaacttccttctctgaatacatttggattctccctgacatagcagtacaaaaggaagaaaaaaggactataacaaaatgacttttaagactaaggttgtagattccagctggaaaacctttgcctcttcccagaaaattaatgtattaaatgacacattttctcccacagtagtaatttataatgtaccccagtaaaatttctacagaactctttccctttctaggacagagttcagcagaaaccacggccagtgagttggccatctatttttgtaaataaagctttaaagttataatggaatacagccatgctcactcatttacgtattgtctatagctctttttgcactacaacagcagaattgctgattgaaatagagatggtacgactcacaaagcctaaaatgtttacaatctggccttttactgaaaaagtttgcacacacaacataaatgtttataagtcaatcaaaaataaacaagaataccgaaggatatactactatacagaacacaaaaacgcttgttgcaatatcattaataataggaaaaaatggaaacaactatataggaactattaaataacttaaaaactagctgagaataaagtttagtgagggtgtggttattgctaattgaaattatgatgcttcaatttgctggaatgtcattaaaagaataattacaaggatttcataatagtgttgaaaaatgctctcattgccaatattacataaaatagcaatatataaaattctttttacattcactataaaaaggaatttgcaaatgtgaaaccaattgtgggttggaaagagattaaaggttttatttgtcataaaaatatactaatattacttaacataatgtatgccatttgtgaaatgctgagattaaaaacaaacccacaagcagaatggtcaaaaatatacaattaattaaatgttaaacaagcgcctgagggattatgttttcaagttcagaataattaaatctcagtaaacagagatactagtactatgcaccacatagctaaatactttgcttttgctgtaaagcgtaaaaatctgaaatccactagaagagaacttactcctgacccccaagctatccattgaatacatccacatcacaaatcccccaagagtactaataacttctgagccactaagaacaaatggtttgcaaaatcttatatttttatattgagtgaatgatgagatattttcttgattaacttatcacatcaaatatttattcatcttctcaagaggggatgacatgtaagagcttttaagatacattcagtaattgaagtttccttcctaggaattcaactccatatcttcctatttagcctacttcagggaactcaccaagaaataaggagtctggtatatgacacaggtcttggagtctggggaagtgtatctttaatcttgggtctgccacttactttacagcccctgggctagttgtcgtctgtctgctgggattaattttaagtgagataccaggcatatattatata

SEQ ID NO: 63660 - DNA, 601 bp, Bovine  19866880967918
  misc_feature (1)..(1): n is a, c, g, or t
natttttctttgtatgaatctgtgtaaatgattaaaaaataaagctgtaaaatatttgtatgaagaataaatgaaactgacatggctttgagtcctgcttttgggtgtgcatttggtgtgctgggaagggagttgctgtttggaagttggtgttcaacagtttttctctctttatctttcaaattctcagtggaacatcgattacccagcatctacccagtaattattcagcacctagtacacgggaggtacacgaatgagatggtcagggtccctgtgttcgtggtgctgatggtttagcaggagagtcaggtgtttagcaattttttacttgtgttacttcaatacagaaaaatatggggtacaatataattgcttggtattttttattacaaattatcacatggaaagacttcagtagtctttttcaatacttagggcattgagatgccagcatttcaatgctggctgtgctgggttttatcagaaactagagacatatcaagatgggtctctatcctagggaaaaattttaaaatatgcatatttatatttggaggtaaatgtctacggccatgttagagtttgaaatgtctaaaag

SEQ ID NO: 63661 - DNA, 2778 bp, Bovine  19866881018169
  misc_feature (1)..(1): n is a, c, g, or t
nagtctcttttatgtctcctgcattggcaggtgggctctttaccactagcgctccctgggaagctctgatatatatacatctatggatgggcttccctaatagctcagttgaaaaagaatccgcctgcaatgcaggagaccccagtttcatttctgggtcaggaagatccactggagaagggatcggctacccactccagtattcttgggcttcccttgtggctcagctggtaaagaatctgcctgccatgcaggagacctggatttgatccctgggttgggaagatccctggagaagggaaaggttacccactccagtattctggcctgggaaattccatggactataaagtccatagggtcgcaaagagttggacacaactgagcaactctcactccacttatggatgggcaaaggaagatgtaaaacagattcttcttgtttttggtggcacggcatggcttacaagatcttagttcccaaaccagggattgaacctgtgccctctgcaatgaaaagcatgtagttgtaaccactgcactgctagggaagtcccacgacagattcctaagagaggtagaggagggtcaggaaaaggctggggaatggcaatgggcacaggcagggagggtggggggagggccacaggggatcacacccaccgcagagtttccgcagtgcacgctctgagtagttgtcacggtcacagcccttggccacatggctggtctgcagctctatggtggcctgaatgttccagagaggttcatcacaggtctccaggcggataccagggaacagagccaagctcccggcgcctggtgcatattcaatccttttgttccagcctgcaggggtgagagggagcaggcagtggagcagagccggttaaggcagcccctcctacccattctgctgatggtcttgggttcctatgaaaatggccagccaggggagacagctacaagtctgccccccaaatgttgtcgttcagttgcttagtcgtgtccacgccccccaaatgttgtcgttcagttgcttagtcgtgtccacgcccatggactgtagcacaccaggcgtccctgtccttcaccatcccccggagtttgcccaagttcatatccattgaatcgatgatgccacctaaccatcttatcctctgtcatcccctcctcctcctgccctcaatctttcccagcatcagggccttttctaataagtcaactcttcgcatcaggtggccccccatatatccctcccgagctcctagcctggcccctgtggttgtcagaagggaggaagagagaaaccaaggtgaaggatggatcatgggccccaaagcatagttcctcaccttgccagctgggtttacaggtgggcttcacctggatctccacctcagcatcgtccgccgcccgcttcttcccgcagtcataagccgtcactgtgaacttgtagagcttctcaccactgtactgtagcttctccgtgttctcaatgttccctggggtaggggacagagaggatcaggggcactagaggaggtccgggggaggactcaggagctaactttagggcaggtgaattaggcagcaggaagcaggcaggaaagaatctggggaaagaagttccatgtctgggaagcaggatgaggaatgaggaggtgaggggcagaacaagtggagggcgcagccccggagcatcacgaaggatgtgggcgcccagggctgagcagctggggtggcagaggctggactcaccgtcattgtcgatgaggaagggggtattgggtgtgaggatctcgtaatagcagatctggctgtactggggggagcagtcgccatcaatggcctccacccgaaggatgcggtcatacagcttcccctcggtcactgccgcgcgatacagccgctccacaaacaccggggcaaactcgttcacgtcgttgacccgcacatgtacggtggccctgcgggtgccagagcaaaaagagaagaaggaagggtcagccacagatgggagtccacaccagaagccaaggagatggaaccagtgtgacccagagcctggtcacgttcatccgtcccccattcaggggtaccaggtaccacaaagggagaggaacctcaggagaaagggtgactgatgtacagggtgaaaatgaccctgggggccatcagtggctggttttgatgacttctgtacagaatattaaaggataggatggcaagatgcataagacaggattctgaatccggcaggttgttttttcatgaaatcaggtccaatcaaggcagatgcagagtaaaagccaaaataaaaccaaccatattcagggaagtggcttccccagtggctaagcggtaaaaaatttgcctgcaatgcaggagaagcaggagacacagattcgatccctaggtctgaaagatcccctggagaagggcatggcaacccactccagtattcttgcctggagaaccccatggacagaggagcctggggggctacagtccataaggtcgcagagtcggacacaactgagcaactgagcacacacacatattcagggaagtggttttgtaccaaagtctcaagtcatctgatgtgtgcagtgagctgtggccactccccactccggcccccatggggcaagcagaggagctggggctggggctaaacccttcatgctgagccttgcccccagcccagatccaggcacccaaagcccagaggcaaaggtcctatctccaaatggaaattagtcatcacgtaaagca

SEQ ID NO: 63662 - DNA, 770 bp, Bovine  19866881081338
  misc_feature (1)..(1): n is a, c, g, or t
nacacacacacacacacacacacacacaccatcccagaaggaaaaaatgaaagaaacagcttaaaagttggaaggttgctgactctctgcagggttcctcctccagcagaggaacaggctgtgaaattatgacggggacggatcatagtatgaatcggctgcaggtacagaaagtgagatgctggtgatggccgagtcagaggggatgactagtccagcaggcaggagaccagaggggcggtggtctcctccagcggagagctttcccagcctccctgccccacttcagggagacgaggtcataaggtcaagctgcccttgctcctccaccaaccactgggcccctctaccatgagcgcctccgtggagaagcttggggttgaggcagggggacttaccagcccagcaggccccaatcatgagcgcgggctcccttcgaggcgggtggatgagaccattgtcgtggatgagggcggggtcgaaggagatgccatctgcatagagtgtgaccgtggggaactcgagattcaaagcatagtggtgccactcgtcatcgcagacctgggaacggggaagggcaggaagccctcggttactgcatccccaggaaggagccccaggcactgccccatcccctggggggcaggagacagtccttcatattccctggtctatcaacagggcttgcagtgaattgctgcagacccagctcaaggaatccttgcccagaatggaccaggctcaacctcatacctaaactacctaaaatt

SEQ ID NO: 63663 - DNA, 1033 bp, Bovine  19866881185186
  misc_feature (1)..(1): n is a, c, g, or t
ntaagtaaattaatataatttgagtgagtgctaagtcgcttctgtccaaatctttgcaacattatggactgtagaccacccaggctactctgtccacaagcattctccaggcaagaatactggagggggttgccattcacttctcccagggggtcttctcgaaccagggattgaacctgtgactctgtgtctcctgctttggcacgtgggttctttaccattagtgccacttgtgaagctcttcaaattatataatttaggtaaagatttaattaatataggtaaagatttaattaatataagtaaagttcttaacacaatacccagctcatagtggttctcaataaattactggggtgttttttatctatttttttcattaccatcatcaccatcaagatacacgtttgattacatgtttgactttcacaaaagcaattcatggagtgatccaagccaagtcaatacttcataagagttacaaagggaatcctcactccctgtattgctcaatatttgccctgcttccagtctcatggctggatcaatgaggcacaaagaggtgagccttaccctcagcaacatagtacgcagcaaacccggtgaaacgctcctcgttggagaagtccgaccggaagatcacctgcaatttactgtatgggatgtggaactctttcaccactggggagtttgaattcttgttggtcctccgtccacagagtttcccttcttcatggcctcccgacattatctaagagaagagtcaaaagaacccaggaaagggtaatattttggcatggagggtagagagatagaccacttcccaccttaggactatgtgacccggcttactgtgtgctcacgctctcagtccaccaccccagccccatcctttcgcacccatcacagtgtacctgcactgaatcataggagcagttctcagacaactctatatccaggtgggtgaagtaaaggtggatcccgtaccctgcagggacttctatgtcccaagacttctcgacctcgttggggt

SEQ ID NO: 63664 - DNA, 1070 bp, Bovine  19866881367536
  misc_feature (1)..(1): n is a, c, g, or t
naactttgctggcggatttaagcatttctggttcttgatctctttcacaattataatgaagaatggcctcatctatgttcttatttcgtagttttattctggtttgtccttaactgtacttagaaagggccttgccctgtgtcttgtatcttgttttcattctggtgtgttgttttgtggtggtgacccctgctctcctcaaaggagcgttttgttccctagtcacagtcacatgcttactaggaatccagtttacctaacacctctctgctgcgtggacggccccgggacagaactcagcacaatagcatcctaacccctcaaatgagaacacctccactagaacaggacgtgactctgaagccttttctgcctgcaggattttggaatttagctttcatttattatcagatacagattaatactaataacttttaagaatgaaactggagaataaattaagtttttcaaagtgcttgaatactatcctgtcagtacgcacaggactctgcgagctgggtgagagttgcaattgaatagcagagcctcaaatcacatttcctttatatattatctcactattgcaagataacaagaaatgccctttgaatagctaaagagagcttatctcataccctaagcagatcctgttaagaaatgtgctctgtccagtgctgaggagtcaaggatgtggaaatatcagccgataaagacttcctaaaaataaagtttaattgcagtgtggatcagagtttgccaggctttccagctgctgggagcagggtagcagcgtgggctgacttcactgtggttgcggacagtctccttcatgacatgaagtgtttgccagcatttctccgatccctttgtggaggccctccacttcctctccacctcttgcctgtcttggttgtcatctctcattcccactgctccatagcagctccctctgagattccaccttctgagaccgggtctcacctggctcctcttccttgtaggggtaccactttgaggaagagaaccccctgcgggaccacccccagccttttgaggaggggctgcggcgg

SEQ ID NO: 63665 - DNA, 1036 bp, Bovine  19866881398751
  misc_feature (1)..(1): n is a, c, g, or t
nccagtttgcccaaatatattaaatatattagtgtctcctatgaaataatagtccataagactaactctttttttaaatcttaagttccccaaccagggatagaacccagaccagaccctggtagtgaaagcatcaagttctaaccactggacttccagggaattcccatagaactaaatcttaaaatgatgagattttctacttggaaaagaatttttcaaatgaaacattgaaatgctttgaattttaaatcctttgattagaagtaaatactacattgacaagaaggaaaagactagacacatatggacgagtgtatataaactaacaaattcttaataattttctaaggaaaaaaaaatatcctttaaagggcttttgaatgaaaataaagaaatgttactttggttttatgatctcagggttcccgcactgttcccaaaaaaaagttcaaaagaaatacaaatggacaataagctaatgggcaatcagcccataaaaggctgaagagaaaataaaaatgaatacagaagatttcaggtctaaattcccttcaaatgtattgttgcaaattgaaagatattttaaaatcttcttgtcctaagatcttaaaatcaaaaaatagaagttacaatagcaaaaataaataagaattaaattttaatccaaattaactcaaattgaagtaaattggtatatgaactttggacatacaagatttctgtatatttttgttctgatttttcccacattataaaataaaaatgcaaatatggcattaacccttatgtaagactttgaatttttctttctagaagcctagattaaatgaaacatcctaaattacttatacttgctgtagagataaagtaagttattacctttgtcattattaagagcatataaaagtatgtaggtgggccacatggatgtttaaataagtttattctattaatgtttaaatttaataattcaaataatgtcttttaaaatgattttcttaatcttagtcattagtataaattccatagacta

SEQ ID NO: 63666 - DNA, 1244 bp, Bovine  19866880368317
  misc_feature (1)..(1): n is a, c, g, or t
natgggacatcctgaggcaggacatgtgcaatgagtggttttgatgctaatgagcccagtagaatgggaattacctgctttctaatcttcctcaacaaacatttctcgaacctctacctgggccaagcacttcatgggaatgtatttggcaaattgatgaaaaatcagaaccattaaggccttctgaagtcagaaagaggacagaaaaggtaaaagagacaaagggttgaggaaaggactggagcttagaattaggtaaatgaggagagctaagtctggactgagtggccactgtgagaaacgactgctcagtcagattcccacgtgtgtccatggaatcaccagctggatctgtgatcctgtgacttctggaagcagaggtgtctgtggcgttagggagaggacaagtctgttccggaggcaggctgcctgaggtgccatctcagatctagcaccacagctatgggattcggctaattctttaatctctccatcctcaatcctctatcctcccccttctctagcctccatccctccatctgtacaatgaagtttataacaggacctcgtgggattgttgctagaagttggtaatccatggagggcactctgcacagggccttgcactctgtcatgatgcttgaataggtttgctcctgctctgcgacagcgtacatactgtgtgtgggcagagaggcaacttgagaaatggaaagggcacctgcccttgggatgtggtccttgcaaacacccctcccctctctgagctccctgggggatgaggatggacaaatcagccaacgcagcaagcagcttgaggaataaagctgggatacattctctgtggagtcattcatctcaccacagacattcacagagacacacaatttctcttctcttaagtttatagcttatggagtatcttagcttctgatggactacaggtaccttctggtgagacttcagcaattttctcaatttttgtttaataagagtaattcactctacgtgccaaggtctgcataaatagtttctgacagatgaaacagtttataaatcctcaagagctttttattatccttgaaaaaacctttacacttagtatctgcgtgccctgagggcttgaaggactttctaaagaacaaatgcaggcatttatttatttatttattttttacagaacaaacatattgtcctgcacagctaaggcttcttccaattccaaaccttggaaatcctgttcg

SEQ ID NO: 63667 - DNA, 1618 bp, Bovine  19866880372866
  misc_feature (1)..(1): n is a, c, g, or t
ncaagagtactggagtggggtgcattgccttctccaaacatatacattaccatatgtaaaatagatagccaatgggcatttgctgtgtgacacaaggaacgcaaagcaggtgctctgtgataacctcgtggtggggtaggggtaggggggaggaggtggtggggtggggagggagggcgggagtgaggtttaagagggaggggacatatgtatacctatggctgattcatgctgatgtatggcagaaaccataacaatactgtaaaataattaccctccaattaaaaattaaattaaattaaaaaaaaaaaactaccacctcttcaaactcagtgcttgaactgtgtcacagtatacagtatgtgaagaaagagaatactaaataaatcagaggaataaagcagatagttggaagcatgtttaagtgacttgagagagcaaatggttttcaagcactttaaacactttaaacacatcaattcctcaacatgcataggctatgctaattgtaaatctttcattaaaaaccagtctctagaggctctctccaggcaacatcttgcaagcctagttctgattactatttcttctttaaagtaaaaagacagtgcttccataagcatattctataatttgtatttcagttggtatcataccatattctttgaataactaaatcagttttcaggtgctttgtaatatatggttttattcaaatgtattagtcccctgatctcagttttcacttataggtaagtagctagcttataactgcttttagaattttttttctattggatgatcaagaacatgatcatctgtgaatgttctcataaatctgacattatctataatgtgtaattgagccacattgttcttcagcatatagttaggtaatttaaatagatcaaaggtatataagatgtcactttaaagcattttgccaagtcaaagaagaattgagttggtcagaggttgtcaaatagattttgaaatatttctgtctttgctttttttttgtcatcagtttgtttttttttaatataggacagaaattaacggagtttattgttttccttcttggagtccttacatacttgtaagaattagttgagatcttaagaacttttagaaaaatattttatttatttatcgggctgtgttgcatcttatttgcagcaagcaagctctttgttgcagcacacaggcttctctagttgtgggctctagagcacatgggcttcattgccctgaggcataaggaatcttagttccccaaccaaggactgaacccttattcactgcattggaagccagattcttaactactggaccaccaggcaaggccctacaaaaaaaaaaattttttttttcctccaaaatttttaaatccaaataaagaagtgttattttaagggagctaatttcacgtggttcctttaaatttatttatgggataaattaaatctataaaaacagtagaaaaatatgtattggaaaagataaaggattccaataaaatttactaagaaaagaactaaactatgtagcccaatgctgttgtgtgtgcagtaaatgtcagcaaatatttccagaagaatgaatgacccagcttcca

SEQ ID NO: 63668 - DNA, 1826 bp, Bovine  19866880434901
  misc_feature (1)..(1): n is a, c, g, or t
ncttcctgtgactcaccctgggccacatggtctattctgccagtggccggacagcaatgttagactctcacaccctcacccggttgggctgactctcagagtatgtgacgagaaggtggcctttctgaacaagttaagtgccttttcgtctcagggccaacacggacctactttctgaccttactttccattgatgtcttggtttttggtcaccagtggcaactgtctcaaaaacataggctttcacatgcctctggcagcagtgttattcttctactttactccttcccttaagtgaaatatgcatactctatgtaagaattggattcctggggtgcgtttgatgaatcacccattttattcagccgtgggtgaatctgcctaccttttcctatatgtgaattcagcctttccctctttgagctttcggaaaattattagtcctcattaagatggatgtgaagtgagtggtatccctctccctttttaaatcactatgcatacatgctcaatcacttagttgtgcccaactctttgcaaccccatcgactatggcctaccaggcttctctgaccatgggatttcccaggcaagaatactggagtgggctgctatttcctcctccaggggatcttcctgcctcagggatggaacccacgtctcctgtggagtctttaccactgagccacctgggaagccccataattaatgtggatcacagcctggttcttttaaaaccactcccctccaggtatcttgagttgagtggagaagagcaaggaaagtgaacgatgatgtgggtggtgggggtaatgtagaaagtgtttcagaaagggacacatgttacgattctcagttcagggtggcgcgtaggctttgagggcaccagcgtgggctgcagcctcgtcctgacctttgctggctgtagcactgtaactttgccttgctgagatacccacctcatttttaagattgtttcgaggattcagtgaaatagtaatatacggaaagcacttatcttggcacacagtaagttgctcttaaaaatggtagcttttgttattatttcaatgaatgctgcaataatatttatatgaccaatggtgaagaaagaactccagggaaaagaccaggcatcatgtcaagacttttaaaaaaaatacaatagagcagttgtgtttatagaagagtcatctggctggcagcagcccataattttgatgaattaggaatctccacttgaaagataataaaatatgttaagcaataactgaagctgtttagcaaattaggattcagaattatgcaatagttgagcttctatagcctgaccactctgaaacataagtaaagatctccatctgtgactgtgtaactgcactcaaactcaccccctttagatatattcctattgtttggatctttaacctgcatttaaactgaaaccagaagggaaaaaatgaaattgcatagacttgataaactaatgataatggttaacattgagcacttcccaggggatatgcattatcttgtttaatactcacaataattctctgaagaagggaaaattattatttttttttatagatgaggaaactgaggtgtgagttgtttaacttgcccaacgtcatccactgaattaggagcactgtctttggaatacctgcctttagccccagtacttggggcaactttacccttcccccagcggacgtttaacaatacctggagatgtttttgattgtcataacaggaggtataaccagcatttggtgggcagagactagggaggatttaaacatcctgcaatgcctaggaaaata

SEQ ID NO: 63669 - DNA, 997 bp, Bovine  19866880444080
  misc_feature (1)..(1): n is a, c, g, or t
ntggcctctcttcataaaatatccatcacggctacaagagaactctatagtaaaataatattccagggcattttccctttgtaagacagagagagctggcttccataggaatacagaaggaactctgtaaaccatctgcagcaacagaaaagtccagctttgaacccctgtgtctgtgtgtgtcgtcatctcgccctcatagaccctcagtcactgcacaatgttctgccctttcagatggcagagttacaagaatgtatagtttaaactctgcattttgcaaaagatgagcattatttttgagtctgggaaacttcaaaataatttgattgccttctgtgttttgtctcattaggcaaaggcaaaaaagctttgcttttctgtaccaatatacagcttgtgttttaattaaaacaagaactaggctcatgaccaggggggaaaatcatgaaacagaaaccctataatacgtaaaagggctacggttggagagtaagaagaggagttttaaacttgggcatctcttctgtaaacatctttttcaaatgtattatgcatttcccttccctcttcctgccactaaaccaggaaagaagcataaaggctgtcagaaaaggttgtttacagaatttcaacaacacaggcaggtttatgggagacaacatttcttgttgggcttcccggtgcaatgataaagaattcgcctgtcaatgcaagaggcacaagagatgtaggtttgatccctgggttgtgaagattctctggaagaggaaatggcaacccactccattattcttgcttggaaaattccatggacagaggggtctggtgggctacagcctatggggtcgcagagttggacatgactgagagagtatgcatgcacacacatttttttgttataccagtgaattagcaagttgaacacatctttggggggattttttcccctaatgttagcatttgaattatatccacttagcccttaaagcagatg

SEQ ID NO: 63670 - DNA, 2049 bp, Bovine  19866880455388
  misc_feature (1)..(1): n is a, c, g, or t
ntgggtggcagttgtcagtaccagcattgcccttggttaaatatgtgaagagaggacattttctatgaagttctcttctatctgccttcctctcttattcttcatcctctcccacaaggtcccagagcttgctcctggggaactcactttcatatttgacctccattaacaaattctgaaaatattttcattctcctttctccatcactgtctgtatctttcccatttcttcaaatccccattaggtaactggttaatctgaaaagttagttctagaacagtgccactcaaagtgtgaagctcctacaagcagcatcatcataacatgggaatttattaaaatgtataatatctgcccatcccccagctaatgaattctgggagagagaaacagtaatcggtgtttttggtgtggtttatatgatccttatacaaacttataactgagagacactgttgcagggtataaataagagatcatggatcatcgtcactttcagatgtcatgtattctgctttttaaagaagccctggaagtcttattctaaaagcatgactatgtgaaaactgggcagaagacatcctattgtgtaccgctaaccatcctacatagtagccctgggttcccgaggctgtgagaaccatactgatgacagagaggctagtttcaaatagggacctcggaatgtacactcagaagccatcagaacatcttgcttgaagttcccgacaggtagattagaatatcgtggcactcagccacagccccagtgttcggaagagagagaaaaagagctcctgaaacagcctcccttgtgatgctaatggcccacctccaacgacacatcatttattgaattgaaaggaggtctgatatgggcaaggtgtgatgacctggcaatttattttacttctccgtgtcacagacctgtttctgtgggcccagcagggtcaaagagcttaaaacgttatctagaataagacaaacgtgttattttcctcttgctttattcttctattttttttcccttaatgattaattaagagacattcctcttcttgagaaatttgagatgaggctgtaccaaccattatggtcattcataatagctaatgtctacaagattaagcttgcttgggaatccatgggccagaatttctagcgaaagaatttttactaagcctatgtaccgccacctccttcccaaatcttttctgtaccgtatcatcctctcaggcataaattttccaccagagaaggatttagccttctctgtaaagtcttttaggatgatgtgtcttctggctggcagtgtttgaaagtcaagcaaacaagccttccagggctcacattgagttaagaaaacattttctgcatgacatttagggccaaattagggaccaaagtcctcattcttttactcaagactaggtttatgtctccacaggcaatgtgaaatggggtgtggagaaatgatctcatgaaataaattaatttagacaggatgcctattttgttcataccccacagagagagagtgtgtgtgtgtgcgtgcctgtgggcttaacagcaggttagggaaacagtaacaacgaagagatgaagggaaagagctctaagtagtggtaagatcaggcttttcctctaggcattactgtttaccaatcatatgacctggggcgagacttctagagcctctgttttctcgacttttagatgattttatgaaacccatttgactacttcccagggttgtaaggaacaggataattaacaagtgtattccatatagatatatcaaagttgttactgtcattaactatcccttctaatatttgcacccagttccgtagagacacattttctgggggacgtgttcacacaccatgactttgaacttttatcctctcccacccagacactggagccacacacttaccaacactagatgaacttgctgtccgagtaatgatcctaaccatagttgcccccagaacaagatatcagaataggaaatgaatctagcttctcacaggaaggccaaggca

SEQ ID NO: 63671 - DNA, 1919 bp, Bovine  19866880459910
  misc_feature (1)..(1): n is a, c, g, or t
ngatgttttcttttcttccttctttatactctttttggctggcaataacataaaatgtgaatattctctgaattaggagatgttatcactttatattggaaaagctcattgcagttttattatttaaggtaatcttatatagtttacactagcaaaactttttatatatacagttttgcataaattaatcgtaactttttaggtattttttaaattgtgttttttattacagaaattgaaattagccatgaatagttaatatttttaagtaatttataaactaattatattgataagctgtataagggaatttagatggtccctttaagaatcagactttagtaaatgttatttattattagctagatttttttaatgcttcatgaaatatatatatgacagattataagaatatgttttattatcatccacagctgataaaatactgggaggcattcctacctgaggccaaagccattgcctagcaagaagattattcctgttaagaagatcttggatgcttgttccagttatgcagaattccatagtgaaatcattaaaaaccatctaaataaaccactatatattttatgaattacatgtggttttttataaatatatattctgacattttattacaagctgcatgtcctgaccgtctttgaattaagtggactgtggcatgacattctgcaatactttgctgaattgaacactattgtgtcttaaatacttgcactaaaaagtgcactgcgaggccagaaaattttacaatattttttctttacagtatgttctgtagtgtgttcaccctctttatgaagtgaattatcaatgcattgattaatgttcacttatacattcctgtacagaaattatgattttgtgattacagtaataaaattatattccttgtgaagtattagtaacaaattatttgggtatgtaaacatattagaagtcttttgaaagcattttaatacaaagaaactttttcttttagatgtatttaggtgatgctatgatcattaattttttaattgaccaaaaaagctgaactctttcattactaagtcactaaatgaaggttaattaagttttgtttttgcaaaatcatcataaaccaaagaacatttatctcttggttcatctttgagagatgctttttgtcttgagtaaaggagtaaatagttgtcttgttttttatcctttcctattataagtgcccaatttaacaattaaaaaaatatttatctgtttctgttacaggtcctatggattttgctcatcttctattaccttcaaagtctaagactttgcatatatttaatttattccttaccttgccttttttttgttgttttaagctaaaagatcatctgtggtcatcgttgacagagaaaagtgctgtgctaaaatacccagtgatttgatgaatagccaatgatggtacaaagcaaatttgaagtaaagtgaaatttgtctttggcaaccatctcacctatttctgtatcatgtttacatggcagttatataatccttgatgttgatgaaaatttaagttgtgactagcatcagacttttcttaaagatgctcctcagttgtgtctcccttctggaagggtaagatgtatgtgtaactgagtcttttctaacagcttactgaacacagttaacgtagcagagtctcctcaggcgatgtttgtgcacttcttttagttgaaatttttagcctcttgtaggtattgttcatatttataatcctagaacctagaagaatacctgacacttataggttaataataaagacttgatgaattgaacagaaaaaaaaaaaatcccggacgatgcaaaataatgtttgccgtcttaagaacaaggagaaactgaatcggaaacagtacagtcttctgttgttg

SEQ ID NO: 63672 - DNA, 1225 bp, Bovine  19866880482351
  misc_feature (1)..(1): n is a, c, g, or t
ncaaagcttgattttccttacctgcaaaataaggtgatattttgcagataataagtttggatttcctctaccctgtcttccaaagaattctgtgatgataaaataaattaataatgtaaaaatgcctcataaaatgtaatataaatgaaaattttactgcctaggagtaagaactcagcttctgtatagagttacaattgtaactgagtaagctttagaaaaatattgtaatacagcacttctgagtaacttctcacaatatatagtttatacatggagtacagtttttcatttgaaagtactgttttattttgtaattcctagttgtttgcaaaagttttatataaaaatgaactaacaagttaaaattccctacatttaatttattcacagaagcatgttaaataagaacttttctctctcttcatagatattttatcttcaaactaaaatatatattcaatattatatactttaagtcaaaatcttaactaggatttttatcaagtctattttgagcacttcatatggtcctagtagtatgataagcattatgtcacttaatgttcacatcggaaaaaaacaattattctccccatttttctccccatctttcagataagaaaactgatacttaactaagtcattgtcaaccgatagtaagagacaaacctgggatttggagttcagtctgtttcaccctaatctcacccttagaacccccatgtttgtgatacaccaaagagaaaaagaatgctgaagaactggagggtggttcttttgcattcatttgcgttattttcacatttcattaaaggattactttagaaagactacaggaaagaaatcaaaagaactggaaaagataattgattcatggacaagggctaattgcttcctacttggtctttagttaagaaatgaaggaaattttactgagagtcagaattgttaaagatatgaattattaaagggagttgcaatatctacttttctgaaggactctacacagattaaatctcatcttcggtagactctgtgaaattcagttaggaaactagaatcaaaggagtgactaaaactagttcagtgagccaccacatgaatatgatagcttatgaatgtttataaaggaaaaattcaatgtaaaatttttctttaagaaataaaacctaaaaataccttagaagccaataatggtacttactaaaaggataaaaaagaa

SEQ ID NO: 63673 - DNA, 2091 bp, Bovine  19866880537346
  misc_feature (1)..(1): n is a, c, g, or t
naccttcccagagctcctctgcaggccagaagagaagcgggagcattgacttccgttgacatttacccacgctaggcactggggtaaaaaaacgaagatttgaagatccttggttcctgccctcaaggagcttcagaggtagaaatgtgtatatgaaatgggtttaaactatataaagtgatttttctttcatgccagtcaatggctttgagagtatgaggtggagatcaagcccattaaaaatggccgtggaggggcaatctcagcttcattgagttcctactgtgtgcaagaccctgtgagcaaaggattattagaaacatataaaactgaggaactgaagttcatctgaaactttaatatgcctgtttctatgaatttcaagtgtgaaattacacaattatctaacttaaagtcggtggccacaaatggttaatttagggaacatagaacaaactgtggaaaattcttcaagagatgggaatgccagaccaccttacctgcttcctgagaaacctgtatgcaggtcaagaagtaacagaactggacatggaacaacagactggttccagattgggaaaggaatatgtcaaggctgtatattttcaccctgcttatttaacttatatgcagagtatatcatgagaaatgccaggctggatgaagcacaagctggaatcaagattgcagggagaaatgtcaataagttcagatatgcagatgacaccatacttatggcagaaagtgaagaggaactaaagagcctcttgatgaaagtgaaacaggagagggaaaaatctggcttaaaactcaactttcaaaaaatgaaaatcatgacatccaatcccatcacttcatggtgaatagatggggaaacaatgaaaacagcaagagactttattttggggggctccaaaatcactgcagatggtgactgtagccccgaaattaaaagacgcttgctctgtggaagaaaagctatgaccaaccaagacagcatattaaaaagcagagacattactttggcaacaaaggtccatctagtcaaggctgtggtttttccagtggtcatgtatggatgtgagagttgggccataaggaaagctgagcaccgaagaattgatgcttttaaactgtagtgttggagaagactcttgagaatcccttggacaccaaagagatccaaccagtccatcctaaaggaaatcagtcctgaatattcattggaaggactgatgctgaagctgaaggtccaatactttggccacctgatgtgaagaactgactcattggaaaaaaaccctgatgctgggaaaggttgatggcaggaggagaaggggatgacagaggacaaaatagttggctagcatccccagctcaatggacatgggtttgaacaagctccaggggatggtgaagaacagggaagcctggcatactgcagtctgtggggttgcatagagttggacatgactgagcaactgaacaagaaccataagttgggtttgagtatgatgattgggaaggggtgagaagtggagagcaagtgaatatggttcttacatcttagagtgaaaaaggagattgattaaacactgattgtattccagaaattaggggaaatctatttacttgagagagctaaaattgaatgctgtgaaaccctgatgattcttgctgcacgctgcattgatctgagtgctgaatgtatctaccttgacaggttcaggccacctttcaaaaaaattctttgaaaaaaatcaattatttaattgatctatatatttatgtttgctcctattcactgttatttactatttcacctaggctgccaacttttaaacaatcttggtacaaatgtttggtcctaaacattagcagatagatgtgttttatataacagttatggagtccattaacatgaagcactaaagcacaaaaagaaacgaaagagatttataagcatgtgaaatgccctcaccagagacagtggaaataaatccaaagtcagaggaacatttatgaagttactgcaagcagatttatctacttcaaaacatgtttttgtgggactgaaacatacctaatcta

SEQ ID NO: 63674 - DNA, 1543 bp, Bovine  19866880544934
  misc_feature (1)..(1): n is a, c, g, or t
nttttctttaaaaattagaaatttgggaaagcttagattattaatactttcaagtaactttaaaagacttctagcactactgtttcacagaaatacccaattctgagcccaagtgctggtaacaacagtagtctagagggcaactttttcttggctgcaactagagatattattagcatcttcagaagcaaacgtcatctcccccaccaaaaaaagttggcaaagtaaagtggtggcatttgtctcctcgttaaaacatcagattgacaaagtccatgtactactccgtttcaaaaagtcccagctcttttaaacactggcattcttatcattttgtgcattcactgctgactgctggctaacggtgtctgtgtggagttctccttgagtatctttccccatcaactgataagccagtcgctcctaggatttctggtcaagagcagtgctcaagaaagaaagctgatagtacatatttgaaattgttgcagtccacattccttctcttgttctgtttatttgtttctttctttctatttgaaggtaggtctagaggctacttactgcgctttcagatggagatggcccgggcacagagtggcagtttaatacactttccttgggaaggaaagacaccgaccctgtaaatctaagctgtatttgctgtcgtagggctaatccatgggccataaaattagagtcaaatataaaataaacggcaaaccactgtgttcacatcaatctatacaaataagctaatgtattattttaggagtgaaaacaatactcttaatagctccttaaatacatgttaaagttccagtacttgcgaatttatttttacaataaaaatgttaggattaaggaaaatagaaaaaaatgatcaaaagccctgttctctcgaaagacgtaacttcagggctttgttgtttttccttagccttttggttgttttgctcatctaactttttattttatttttcactgcatttgattaatagaatattctctgggatgtctttttaatatttagcctgcagtaggtctttgttgctgcgtctgggccttttctagttgcagggtgggggtttctcattgcagtgaattgacaggtgggttctttaccattggatcaccagagaagtcctgaggtggcttttatgacgatgtgtaagtcatgactttaaaatgtttttggaagacagaagatgctttacagaaatgaaaaagtgtcaagtattctttcctgccacaacaaagacattgttcaaaagaaaagattttcagatcttgcaaccactgcagtcattttctttattttttttcttttctttttttaaaatttatttttaattggaggatgattgctttacaatgttgtgttgatttctgccatacaacaatgtgaatcagccaaaagtatacataagtccccaccccccaccccatcccatccctccaggtgtcgcagagcaccaggtcaaacagcaaccccaccccatctgttttacatatggtggtgtccgtatctcagtgccactcc

SEQ ID NO: 63675 - DNA, 1213 bp, Bovine  19866880578570
  misc_feature (1)..(1): n is a, c, g, or t
naggaggagaccaaggctcagaaaagtcaaatccgcccaaagtcaaacaaactgaaaagtgatgggatcaggatttggcctaaagagtaagactctggaatctccctgagatagaagcttctaaatccttctagtgactaagatctggggaatttttatgttttttttttcttttgtgccacttatgtgactttaaaatacgaggctgtgaattcctacaaggaaacttgactcctattatacacaccctcatcctttcatagctaacacttccttgcagatgcctggcttgtcaggaagccatctccctcatccatcccagtccagttcctctgaccagcacctctgcagcatatggtcgctgtgctgggcacagtgcaagtgctgatggggagtatctcaaccactcctcgtaagacctctgcttcctgcagctctccgcttcatggtaccgacgaggaaacaggcgcagagagtttcagtgatgcacaggatacctcctggtaaactgtggagctgaccttcaacctgaggcatgtgccattcattatgggtgttccacagccgccccagctgaaactcccatccgagtcttcaaaaggaaggaataagcatttttatcaatggagtttcagcttctcagaaaaacaaggatggccgcagcctttgcagaagtccgaagatagtaagagtggtcaccagagggagacagagcttgagacatcccagtctcttctacttcagcaccttaccactcagcgaagcgcagaactgggaggaaaacagctccgtttgtttggaaccctttgtttgggtttaatttcttgtgtgatcaggtcctctccttttttcccccttccctctgctccatttccttgcctgtttctaagtggtaaggaacagctttatcagagtatacaatacaaaatcagtctctttcctctgcccagagcctcagtacctgatatctgagaaaacgctgctttctgagtgaaaaggcaccaatatacagttttcatagctactgcgtcagattctggggccctggacagaaatacaaaagcaatactagatcatttttttgagcaaagaaattaaacactgccaaggcaaaggaaagtttgatgtgcaacttttttttattggccataaaactttaagttggatttttaaatacccaataattctatataaataatggatatgtgaaatt

SEQ ID NO: 63676 - DNA, 1537 bp, Bovine  19866880580681
  misc_feature (1)..(1): n is a, c, g, or t
ngatgaaaaatgaagcttgaaagaatgttcattaccagtcggtatgtgttgaccagactgatttttcaactgccaaaatgtgtatactggcttctgtctcatctacagacctctagaaccaaaagtaattgatcaaattagctcaactataatcccctactagttctgttatgattgcagcttattagccttagtacactgtttatttaaacacatggatgacatcatgaaaaccaccccctttcatcaaagcatgatgcagactatgaaaaacaatttggtttcaaaccaccctaagatatggtcatttttcttttcttctctatattgaaagataaagtataaaacctcagtttacagtcgtttgatttttatgccagctggctctcccccagtaaaatggaagcattttcatgtcatttagaatgaagcaaactaaaatactaaacaatcatgcttcacccctgcaaaaggagaaatgatgagaggaattgttattttgatactccctttatctttatattctcaagttatttttatattcccatgttcacttttccatgctgtgtaatggtttcatgtacttctgtctgtcagataatgcccactaaagtattaatgctagaattagccacaggactagtaagctgttttccttggactaggaaagatattctttcttgggtgatcttatggttgctggataagttctgacgtgctttggttagaaaagttggtgcatgtatgtacattctcaccttcaaagcatgctaagttccttgttttctatggtgtttgtgctgtcatagttccaatattattccacaacaccaccttcttcctttgcatcaatttttagcatgtaacaagcctaatctttgaatacttgtaggagacaaatagattagtcattcagaattgaactactgctttactggtggcaccaatatgagccaacactccaaaagggacacgaaatacaaataattaatgcaatcaatggcagacttactctgttgacacttgcaatttttgtcaccttggataataaatctatcctttagattttgagaatttattaaagtaactaattttgcatgtgttattaagactttttatgtagtatgaagggtgaaaaatctataaagtcatggttattgtctacaagatcaataatttagttcagcatttccaaaactgtattctttgaatcactagctttaagctataccctgtgaaaaaagaattccatgtatgaaaaagtgttaattctctcttggaaaatcatattaaaggccctgagatatcctgaagtgaagagatatgttaaatctgtttaatctagagtttaccgcatttatttgatcataaatcactgtttttgtgtagtacctctacacatttcatgaaatgtatttgggaaattctggcccagtacacttgaggaaggggattgtatatactataataagattttagattttaatctataatattatagattattatattatattataatattatattaataata

SEQ ID NO: 63677 - DNA, 1690 bp, Bovine  19866880672011
  misc_feature (1)..(1): n is a, c, g, or t
ntgagatgctacccaaagtatactggcatacataccaattacaatctaatctcttaatggttttaaaatcagaatggctaagtcactagaccaatacctatagtttcttctcttatacaggtcttaggaaacctaatgatgtcattatgaaatgtagctgagtttaagataaaagataaagcataaaaagtgtctgcagataacaaaagaaacagatggatatttttattgcttcatctctgtttctccttaaaaacaaaaacactgacactgaccatggatcaatcactatgtttagtatactctgcactaggtacactaacacaaaaaagatttttccagttgagcctcgtgggcaaatattactgcacagccctgacgtggcaaactgtttgatcagcagggcacactgtaaacaagaaaaccatctttcctaggcagagatacagagttctgctttagagtttcagcacactcattaacatagaattctgagacttagagactcttcaatacaatggataatccaagtgttctatttatgaccctctactattagaggaataaccacaattttagattagcagctacttttgtcatctttcagattaaaacataaatgccatgaagaaacttctaaggatctcctaggaaaaagtcaaggaaagaaaagaaaaaggagtattacaattttggttaactgtcatactctaagttgttaggtagctcagaacaggggaggggggtggctgggtaaatgattgtcttcacattttaattttctgacacgaattcataaaatacatgaattcatctgcagtgaaaacttttcacacattaaacaggaaattatatggacctctgtcatagaggactgtatttttaaatatacttatattaaaaaaatacaggatggtttcaatattcagccactataaaagctgagggaggatacattatcaagtttacattatcaagttttaactcaaagaaagccagtttaggtaaattaagctctcaaacacacaaagacttactattgcaattatttgtgccattaattctaaggcagatgctgctttttaatagccaaacattaatttgtatttaaattttaatcttaaagcaggtaattgttttgaagagggtccaattttttaaaggtagaaagagactacaccaaatcctgcccccatatcaaaaataaattcctgaagcatcaatttattcacttaaaattgaatcaaaatggaacccatggtaaatactaaaacatttttaaaacagatttcaaatatatatagattatgaataaagtaattcttaagttcagagtttaattttgctttgtgaaaaattgtaagtaagaaagaatataatcattgctatttctcaaagtctgaatgccacaaccattagtttgtgtccaagtactgctcgaaataatcaaattattcatgtgacttatttccaaacacttaaaaccagaaaggatcacattcgtgcttctcacaacagtctttatttttcacaaagcaaagtaactaaaatttcctatcctcctaagtcgttaacaagaaaagccatcaatagtacttcacagaaaatgttagttttaagagaatattttgataggatatatgctacaattgacaattacttaaaaaaaaaataaagctatttacaatta

SEQ ID NO: 63678 - DNA, 952 bp, Bovine  19866880765466
  misc_feature (1)..(1): n is a, c, g, or t
ncagtcagaaagatggaatctgaacacagctctctgactggaagcgctaagcctgagattctcagcttctcaccctcccctgtgcctgtgcatctcctggggatcttgtgaggatgcagagtgactcccctaggtctggcgtggggcccaagagtacatttctaacaaactcccaggcctgctgctgctccatgggccatatgcagagtagcaagggggttaaagaaacagttgcatttactagactgattccatccttacagctgtgacttctaaaagctgagactgctgccagccatacatgtctaaagagttaaccgctttaaagagaaaaacaagcatgtttgacctctatgaaactgtgcagggaatttttttttctttataattcagaaaacacaagcttgtaacctaaaaccaattttaaatgaaataaaatgcactgccaatgttttgtgtgtgcactcctgttgttttcagccagaagagtttctttggggtcctacacccaaaccagatgcattctgtgtttctaccaggaagccatcagaatctattaaaattactgtacgctgatagcagcggggacatgacaaatcgcaggccaagagtcagataccgcagaatgtatttcggggctttgggggcaggcccatttgcaaccaaatgatattgtgcgaggctggcatgctcagtgcatgacaaacggatgcaatttcagccctgtctgcgggtcaggggagatttctctgatgctgcttggggttggtttacagaattgtgcagagttcccagatttgaatcgcttggggcttcagagggcttcccttgacaagctacaaataattacactctactctttccattgtactcgattattttgcccccttatctccaggatttgagcttttgcgaacaagcaaggtggcttctattcgaccacagcgcaaca

SEQ ID NO: 63679 - DNA, 2675 bp, Bovine  19866880823450
  misc_feature (1)..(1): n is a, c, g, or t
nataaatatatatccatgatgcctagctcttcttttagacctttagtgtgttctccccacctccccagtgaccccacccctgccgtgtgtgtgtgtgtgtgagagagagagagagagagagcgcgggtgggggatattaaagaatataacttcagaccttcatgttcccataggtattgcttttagagaacatccaatgtaatcacatggatgacgcagttctgtattatttctgttttacagattgcctctccaactgacatgccatccaatcacctatatctattatatctacccattcaatgttcatctaatgaatgaaaacttactttatgtactagtttcctcttccagggattttctgctcttttgataacctgttttaatgttttttgtgcattcttaaaggcaatggaacttctttatagaggcaattaatacatgtaatttatgaactttgctggacagtctagttaaaaatgtaattgaaaaggatgccacaggtgcattactgctatcaataaaatctctatagttttgttacaactgtaagttctaaaggaggcaattttgtctgtgattataagtcatcaaatctaacaagccatcaattgtaagattcattccagtttttgagatgctaaaatgtgaaggaaaaaaaaaaggccagcaatagttccatattgtcacttattgtaaaattaatgtagaatctagagacagtaaaatgtgaaaaaataatacatctaagaattgactgaacaggtttaggacttccctggtggctcagagagtaaagaatctgcctgccaatgcagaagacccaggttctatccctgggttgggaagacaccctggagaagggaatggcaacccactccagtattcttgcctaagaattccatggacagaggagcctggtgggctacagtccatggggtcacatagagtcagacaccactgagtgattaacacacacacagaggttttaggctgaaaaaaattttttgccaaacttatcttatactttacttataggtaaataaacaatatttatagcaataaaaatcataaattggaaggtatccaataaccattatagctgacatttacctactgtctactacaggcttcctgtgacttttctcatttggatctcagagcaaccctgttaagaaagttgtattatctccattctaaagatgaggaaactgaggtccagggagacattttcttatcttttcttttaaaataaagaaatatatatatatatatatatatatatatatatatatatatataggctcctgggctagtaagggtagggctaggatttaaactcagactgaggagctaacgtcctgtgtcttctgtgtatgaatatccaccacggctcatgacccatgacccctgactccataaaggacgtgctcctttggcaccccttgggtcacagcaatcacattaactgtctgtcagtctgtgggttgtggacctcctgtgctagttatgctttttcaaaggccttggagagcagattcttgcttgtgccgatcaaaggttcttctgtgcactttcatctgcaatcgtagaactttcagtgttgtttacttatttctgccccatgacaacaaaataataaagtcaacagaatatttctccttttaaaagtaaactgtggaaaaactctaacacagcctgtggaagcaaccccctcaccagcaggcccgtcaccattcatgaccattcggaggaattctgagccttttgtgaaaaagtgacttttatttttttaatctgatcaggtcaaacatttaaaatggagaatgaacatcacataggcaagtgtgttctttctcagtaaatgcttaatgctatgatgcctgctgtttccatagcagaacttcttgaccaaaagtcacattaaaggtttagaaacaaaatgagaagtttgatgttgaaacagtgaccaacacgccaaacaggccggaacccccaagcatgtgagggcgagagcttcactgggaccctgaaggagaccatctgagctttcatatttgaataaaacagtccaagttacacaggcggtagctttgacttgagatcattctgtcttgattgtttcaccagcagcatctctccctcaggacagcaaagcaggcccatctgaacacgcgcccctctctttccctgagtgtccctcacgcgttcaccttcatgctccccgtggctggttctgctaagtactatcagacaatgaagtaattgccccctctgagactttgtgtgtcaagaggaggaagatcaattcctgttacccaaagatctatcactccaggagaccactaaaaactgctggctaccccgtggttctggagtccttacagttaattttttaccagaaaaaggatgccaactgtgagtcaaatgaagcccattcttttaagaatctataggaggggcagagggtaaccaaaataaaccaggagagaaattttcctctgtactatcctttccaaaaggtatttactgaagaaacaaaagcagaacacactcaagtgcctgctccatgtagaaaaacctgcatgtgctgaagccattagaaaactgttcagtaacagtcttccttgtgaaaatattaggcttgcgaggttccaagctcagcatctccacgg

SEQ ID NO: 63680 - DNA, 809 bp, Bovine  19866880826389
  misc_feature (1)..(1): n is a, c, g, or t
nttggcaaggtgaaatctaaaatccaagcatataaaagctatttttaagtgggaatgaagaaagcatgtgatagggatttgactgaggaatggttaaaaaaagaaggtattattatgttcatatagattaaaggaatgtaatcccattgaaatttttcttttaaggtggtgccagaaaggaatttatttttctttgtagtaatactaggacttgaaataacttacctactaatgagttacttcgtgggaaagaaaaagctcatttgtgtttgcattgctaaacatgaaggcaaagaagccaagatgtggtagaccagttctcttcgtctatcagcaatggcagtcgtttatttctgttttccctgaatgatgcatggatacctggatgaggctgagtttctgccataccaggcagagatgatccttgaatccagcaaaccacatggctcccagatattgcttctggcttagtgaccttcactacactaccagctcattttggacagggattgtttagtgcgattgccccttgctcctaaaagcaaatacattacaaactggtgtcagatgccttgtttcgtttcagggcattggagagtgagtgtgttttctccaactctgttgatagcacaaatgcccactccttcaatgttttaattttatgacaacttcaaccctgtggcactagtggtaaagaacctgcttgccaatgcagtgagatgtaagagacgtgggtttgatccctgagtcaggaagatctcctggagaggggaatggcaacccactccagcattttgcctagagaatcc

SEQ ID NO: 63681 - DNA, 3709 bp, Bovine  19866880850325
  misc_feature (1)..(1): n is a, c, g, or t
nttgaagtactgtttctttagaaacttttagctattctaaagttaattttaaaaagagataaatgaaaatgctaagaaaatttggaaggatttaaaaatgtaagaatacttatcctgctgctactgctaagtcacttcagtcatgtccgactctgtgcaaccccacagacggcagcccaccaggctcccccatccctgggattctccaggcaagagtactggagtgggttgccatttccttctccaatgcatgaaagtgaaaagtgaaagtgaagtcactcagtcgtgtccgactcttagtgaccccatggactgcagcccaccaggctcctccacccatgggattttccaggcaagagtactggagtggggtgccattgccttctccaatacttatcctactagatattaaatttataaattataatgtctgacacaaaactgcctcaggaggcagaaacagtctgaactgaaacataataaagcagccagaagtagacccaaggatatatggtagtcagttatatgagaaagatggcaggcatttcaactggtgagatgatgaatagaatttctggtaaatagcattgggattaccagctagacatttggggaaaagaaagctgaattcctatggtaaaataacctctagatggatcaaagagttaaatgtacacaaaaagataagaaaagaaaagagagaaaccagaaactacgagaataaaataggggacaatatttctaatcagtataagtaatacaagttccataattaaattttgataaatttggttacatagtaatgtaacatttctctgccatgaaataagcttttaagttaaatcaaaatacaagctggtatatatatgaaaaagattaatacacttaatatataaagagttccagcataccaataaggcagtcaaacaccccaacagaaacatgggtaaaaaaataataggtagttcacaagtggagaaatgcaaggattaacaaacatgtggaacatagtcactctcactagtagagcagtggaaaagaaattacatatattatttttcactcatgaaattagcagatgtttatgtgactgtagggaacactgaattgtccaagtcatattgatgtaaatgtaattctacagatttttgtaaagcggtgtgggagtgtgtataaagtcttaaattagatacctttggcctaatagctccagtccagaaatttatcccaaagagatcttgtgtaggctaaactaatatatttgaggttctttttcatgtatataaataatctataaatatctttcagtatgaaactgatgattaattataatataaattataagatatcccatatccaataaaatagcaatatagatctgaatttctttggtcagaaagatgttcatgattttttggggggttaagaaaagcaggttaaaatagtaggtaaggaatgaattgaacatgcaattgtaaataataagatccatctatgtagctgtgcacatagaaatatacagacatgtattagttatatttccctggaatacaactgacagaatctcaatctaatttaagcaaaagaggaatctgggggcttagatagttgaaaagtgcagagttttgttctgcttttagacacatcttttccagggcttcaaacgaggtcatcatgaacagccagttttcccctgtttccaagtttctgccctactttctctgtggctttgtcttcagaacagtatctcccctcatggtgacaaggaggctgccacagcttttgcctcttctcctgtccgtatcagccctggcgaggaagagagaaagtcttttcctaattactcagttgaaactctgggttcaccagacttggctggttaatttgggatttgtgctttgttattgttcagctggacacgattgaagcaacttagcagcagcagcagcattgttcagtcactaagtcgtttgtgtctgactctttgtgacccccatggactgcagcatgcgaggctcctctgtccttcactgtctccccggaggttactcaaactcatgttcattgagttggtgatactgtccaaccatcctctgctgcctcctttccttttgccttcaatctttcccagcatcagaatctttttgcatcaggtagccgaagtattggaacttcaggttcagtacctgtcctttcaatgagtgttaaggactgatttcctttaagattgactggtttgatcttgcagtccaagggactctcaaaagtcttctccagaaccacagtttaaaagcatcagttcttcagtgctcaggcttctttatggtccagctttcacatccatacctgactactggaaaaaccatagctttgactgtacggatctttgtcggcaaagtgatgtctctgctttttaacatgctgtctaggttggtcataactttccttccaaggagcaaacgtcttttagtttcatggctgcagtcactatccacagtgagtttggagcccaagaaaataaaatctgtgctcatacccaaaccaacactctgatctagagaacagcagttctgactggcttaggcctgtatgctgtgtcagactttccactgtatctccaccatatccaaaggtaatctaggataatacctatagtgtgtggcctgagaatcagctgaggcagggggagagaggagggatctcagtttaggaaaattgatggggtaattatctgacaatgggtaagtggatgctgggccactgaaagaacaaaagacatttctcccttcatgatgatgtttttggacaccactgttgtatgtattatttgagaatttgcaatcttttaattagcaaaacttattcgagactattagtatgccttcttttagataatctatttgcaatataaataaaatacatagatatttgtttctctcactcatgatatttttgcttgtattttgtatttatgccatgtctttaacttatttttctttcctataaatctctcagtattgcttctttctgttgtcataccatagctgttattcaagcttccaaagtcacaggagaaacaatccatgcaaaaagggaaggtatttaccctaggaagtatttcagagaaagaagaaaagtaaagaaataggtggtagctcctgaatgtttgaagagggttctaggggactgactcgttttgaagttttgtttgcagaacaaacttgatttttactttgtttgcaagtttctatacggtgctggaggaaaaggtgactttctaaagcctccctgaaaagcctttcaatttgaatgtgctcagttgctaagttgtgtctgactctttgggaccccttgtagcctgccaggttcctctgtgcatggaatttcctaggcaagagtactcaagcgggttgccatttcctcctccagggaatcttcccagcgcagggatagaacccaaatctcctgtgccccctacactggcaagaggattcttttaccactgagccacctgggaagccgttggtgaatggttaattcagatcagtgcttcaaaaagtttgtgtacacataagtcacctcagatcagaacagatcagtcgctcagtcgtgtccgactgtttgcgactctatgaatcgcagcaccccaggccttccctgtccatcaccaactccccggagttcactcagactcacgtccatcgagtca

SEQ ID NO: 63682 - DNA, 767 bp, Bovine  19866880858042
  misc_feature (1)..(1): n is a, c, g, or t
ncacacacacacaaacctacccctttgatgatcacaaaggcaaactctcataatcaccagattgcagtactgaacttcttgggagacacgacatctaagaacccacaacttcacagagtttaattactgcattgccccatggagcttaccctcaactctgatgagcagatttcatgttagccttataaacaaagtgtctaaactattaccgctcagaattttaaaattgcagtatgttttcttatggaaccagccccaaaatgaagaactcctcccctcaaaaacaaaaaacaaaaaaaaagtttatgaactgatgtggtaatgtcaaatgccaaataccatgaaaaatatccagtatgaattttctttcccatgtgaaggtctagtttgctcacctgaataaactggcttccgatatacattacatcatcagtatgagatcagaattttcttccttagatatacttaatgtagaaacacgtgaagcctgtgtttctttaaataactgtagttacaatgattttaaagtatgtatggccatttgagtattattgagtagaaaagtcttaaagcattggttctaaactgtgaattgttccacatcagaaaaatcactccacaccaagatgccttgtaattactctcagaaaccaaactggtaactcttcatccagatacttaggctttctcttgaaatctgtgattaccttggggtccaaagaggaatgaaaggtagttaaaaacaatactaaaggcaacataggaga

SEQ ID NO: 63683 - DNA, 1224 bp, Bovine  19866880889576
  misc_feature (1)..(1): n is a, c, g, or t
ngggttcctgcctgcagtagtagatagaatggtcatctgagttaaattcacccattccagtctattttagttcgctgattcctagaatgtcgacattcactcttgccatctcttgcttgaccacttccaaatttgccttgattcatggacctgacattccagtatctctgccttgtcctcgtgttattaccatggagaggctgaattcattactccatgcccaggatccaaggatacgcccacataaacatttgaatagggttgtcctcagattttgagctttgctccccatcctcaaagtccatacattcccccatggtgtagtattggaagtgggctggatctgccttaatcacaggggaagagtctgacctgagttactattctggcaaaggcaaacaggcacaaatgaaatacagtgaaggacccttggctacctgctagggaccctcctggggagcctggaggagctgtgcttatagagagccaggctggggacattggaagcaagcgggaaagtgtgctcaaaggcagccctcgtaccagttaacttttctcattttgtttgtctaaataaaatgatttctggttataaagcagctaacctttttgcttttctcttgtgcttcgttattgtccaggactttataagtagctgacgttactcaaaatgtgcaaagaagaataatggaagcccctgaataccttgatttggatgaaattgacttcagtgatgacatctctgtaagtattgctccttgcaggcagtgctttcaagaaattctgccttaatctatatgggttcctttctctgttgtagtctgtacattctaagctcttcctaccacatttagaaattgacaacagaaatcctgctgtggcagacaaagtgtggtttgggggccttcctgaccaggaagtaaatgaatcccatttcgttttgtgtgagcttggatgagaaagcatgtaacctcgctggacttccccttcctaatctgtttctttcttgtcacaattattcattaggtaaatgtaattaacccgattggtgtagatgcccataatgtacataattagtccctttcatatacctggctgtgccacagcctgcatggactaacattcacaaggacacagactgaaggatggccaagttattagtctttgaacaatatctttcagtaactggagctttcaaaacatgggttggacacttgttgggaa

SEQ ID NO: 63684 - DNA, 1408 bp, Bovine  19866880976570
  misc_feature (1)..(1): n is a, c, g, or t
ngctggtcccagccccagctacatctgcacttaattaaaagatggtgacctcttccccacatcccccatctccacagatgttaacttcattatataggatccatgcatagtgcccttctgattaaacttcctcagtggactcaactaagcatttcccatgaagaccacccagaaacctcagaaggtcttcagtctgtgtgtgtgtgtattttaattctcagtgctatgcaagggacaagacatcggcctaccgaaccctacaaaatttgggccttggttactttaaaaattcctttctccatagcacttcacagcaacaaagatattctacgtttctcctgttaatgagatccaggtttaaaatttcagaaggaaccttttcagagcaagaaccccaacttaggggcatccagtcactagaaccataatgcagttatgtttattcataaagttaagtctattcataaagaaggaaaatgaaatgcaagaatcaagtaaaaattaacttaaaattcaatgcttatacaacatatatgcatcataagatatataaaattattatttattgaatctgaagcagtccaaatgattatactggctaactgtaaaaaataaaatcctggtcatgtattttaaattataatgtgcttatttttattaaatccaagttcagaaaaatagattattatggatacttgtcaattcttccaattaaaatgtaccaacttaataaccaaaagaggaaataaagtctcttaaaataaatatctcttttttttctgaagaggagtaaagttgcatgttaaggtgattaagaaggaagagtgggttaaatgtctgtagtaaccaaatatttacacatctgtacatacagaaagaatatgatttagcaagcactgattgtttcatccaatggttttctctagccaaatttactaaagataattagaggaaggcaaatgaacagaatctgcttctagtttaggtgaggtatcgtgattaaaagtgcaaaaatgaacattgtatactatactaatgcacttccaatgtatgtcatagtatgtcaagaaaaaacacaagatgaaaacacaagattactgttaagtacctttaaaggaattcagctaggcagtgtaatcctcagtttttacaatatgctgctttttaacatagtatcttacacacagtaaatacttaatacactgttgagttcacttccagactatgatcattgttgggttctacactaaaaactgtggtattgtctgaaatcacaaatgttgagatgactatttttcttcaacttataataacttcaggttcaaatatcttcttcttgcactgtttccctcagaagtcttttttttgaggaaaagtcagtctttagtcctctttcagaaattatctg

SEQ ID NO: 63685 - DNA, 1887 bp, Bovine  19866881023737
  misc_feature (1)..(1): n is a, c, g, or t
natcaaattggaggtgtacatgtgatcccattaaagaggcctgagtttttccctcaaacattcgtttcttgtcaggtctaatcattggtgattaccttgagcattggatgtttgctctgggtgagtctgaaggcatctgaacttgaaattggcctccttctcaaccacagaagaaatctgtaacagcgcctattgtggaagtggctacaagtcacatgacctggagaaaaatggaataaaccacccctaggaaaattatttttaaaagtttcggttaattcacttaacttggtaagcaagaaaaactatttaacaaagaacaaattttccacttcactggtgagggaaaatgctagcttttaaagttttaaaatatcctgaaattaaattactatccctaagtctagctatctgatagtataaggaatgtataagagaacagactccagagacagacttcctggagtttgaatcccaactccgtaatgtaattgctgtgtgactctgggtaagataattaacttctctgctccgtgcctcagttcgcccatccatataatacaaacatcctaatggtacttagttcacaaggattttaggattgagttaacacaagtaaagggcttacagctgtacctggcacattaagcactactgaagtgtttgctattaagtcttctttcttactctacatcttcaacttaaaaaaaaaaaaaagaaaatcttgtatctccaaagtaccttcagatacatcacctaattttgatactaacagtagcctagcaacactggcagaaaattttcttttttattttatagataatgagtcacaggctcaaggtgggatagagggtaaagggttgcatgctaactcagatggaggtcttggactctgaggctgggggcctgtccactgaatctgctgcctttgtcactgatcacagggttcaactctaaatctggggatggcttttaaggaggcacattctgataagccttgtgatcaaagcctctgttaaccccatagaaacttgagtgtgcttgaaattaaaaaaaaaaaaaaaattaatggaggtaagcgaaaactttcatttgcacttcaaactatcttccgtgacgattctgacccagacaatgaaacattactttcactcacacagaaaaacaaagagataaacaaacctagatagacgaattattttccccacctcatctaaacaaactgtcgatagtaaacaaacgatccagaagaaaagtaaataagttttgtacagttgtttcagttcaaaaggcctagaattctcatagctgtataggtaggaagatctatttattttcaaacacaatgcacctaattcaaggattatcttaagtctcccatcatctgcagttcttaggattctagttactatcagaggtcccgctttggcaaggttaatggtgatgccttagagtaattagttggaaaaataacaaacatcatttcatagtttaatgctatggtatcattcccatcaatatccttttttattttcattttttgcccatcacagagagaaaagcaaagaggcttaatttgattttcagaaggaaaaacaatcctgaatgtacttttattttggtcgagggtggggggcggtgcaaggagaaaaggtcagccagctggttttcatctatatgccataattctctgtttagtttacactattaaactccaaagctttgctttaatcttaactgttacagtatgccttactgcagattctatcatgtcgcatccctgataggatttcaaactttggcaaagcaccatcccccaagttggtccttgccatctgggtagtaaacgtatccaacattttttcattggcgcctgcatcattatgt

SEQ ID NO: 63686 - DNA, 1819 bp, Bovine  19866881042168
  misc_feature (1)..(1): n is a, c, g, or t
ntaatcacgcataaatgccaaacacaagatggtgcacgataggtgccttctatccccaaatgtttaattaatgaatgcatccttattgagtgaatttatggtgggatcatcaggtattttaaagccagtaagccttttgacatctctaaatgacacttgatatttagacactgtctactccagccgtgagtaaagtcattgcatgctcagacaccctgcccagaaatatacttcttcccttcttaaccactttcctcccccaagagctcaggcactccttcagaactcatctcttggggctatcggattaaactgagcaggaaaactggtagaaaggttaatgcaattgattccacaacttggaatggtttgaattcaaaggtttagttgctaattttagtcccagggttaggatattgaaaaagtagactgtgtctctgtttaaatcatcttccttaatgatgatgtaaagtaaaatagtttttaaatgtcctggagacaggcaatatatttttaaaactttttggtttgtgtgtatgcccacttagactgggtatagatgaacatagccacataaagttgccagtttagggggagaaaagacccatacaattttgggcttattacaaaatgtaaaaaatatgatatagacctcccactgagtagctctgaattaaaaccaacttttacttaaacgtggcatttgtccttatgtaactctttctgggcctctcctcaccacccctcatccagaaaaaaagttttaaaataataagaataatttgatttaaaatgccaatctgttttaatgctttagcctaagttcttcatttgggttcaacatactattttgccatcctggcatatagtacagcattcacttaggaactataatccttattcagagaaactctttggtacacacagctccagctatatgtaagatactttattttctgaagtaaatgaaaatatctctgcaggaattaaactctcagaatagatctaccttggggtttcaacagcctttctgattgctagcccagcaccttgtattaagcaagatgtgcttcataagccaataaacaagaacaaaacttgccttcatgtttatcaactcagaccctttcagtcttgtcttcatcatgcatttcaccacttaaggcaaagtcaaggactttcagtttgtttatatttatctattgcctgccaaacaatcctttgctctcaaatgccccaaccccccacaaaccaggataagaaaaggagtttaagttattcttatttgatgcctttatttggttctttcatacttctgaggcttacttttcatccataaaattaaaaatagaagtgaaagtcatccttgtttttataattaaaccctcatttcatcaaactggatttcattggcaggacttaaaggcataaccttccgcttattatcaccatcctttataattcctgcagtcattacttctgtggcagatgactgtggtttgggctttttttgttgttgttgttgttttaatatatgtctctttactgttctttggaaagtggccattgttaatatggaggttcttccatatatccaagtttatgtttgccagatgctctagagtaaatgattattcaaaacatatttgaatcctttttgttttcatccatagcttaagtttggcactgaaagactaatgaacttaaaacataattttctccttatacatttaaaactgagtcacatgcatatgtaagactctttttttcttgtctatgcaaaatgctagagacatgaactccacaagtcctatagggt

SEQ ID NO: 63687 - DNA, 1241 bp, Bovine  19866881073828
  misc_feature (1)..(1): n is a, c, g, or t
ncccattccttctggtttctctgtacctctgcttatacctttgtaaaggtctctttgtaagtgatcctcaagttatctgacttgaacgtgccagctatttcttgcaaggaccctgataaaggagacaaattactctgaaagtttatagcttaagtaaaaaaagatgggataaagagacatgttttctagccaagccaaaagctattcatatactaacatctgattatacagttttggaaaagagttgactcttttaatatattcttcattggggattatacattttctggaccaaaatcataatcagatccaaaaggtttctaatactttatatatagttaataaaatttaacagtaacaggaaaaaagataaaagggaacaaccctttcagtttccaaagcagagagaaaaaacagggcattgctcctaaatcactctgttgccatgcaaacttcttagccataccacgctgaaacatcccttagaagagtcagtctcccaattctgattctttggctaattaaagcagacgtggggcactgcaatggctcactttccaaaattcagtgtgagaagagtgggaatgttgattacatgtgaacagagggattgaaacaatacatttcctgtaggcatctatgtacacataaggattctttctctctctctctcactctctctctctcacccccacacacacagccagaaaggtaaacccacagagaaaaaggtgtgattgtcagaattcattctgctgcttggagactagacaggaccaaaggctattactttcgttctgagtcaaagcagggtgacatgctgacatgttcaatattttctgccagttggtcaccatttgggtaggtgggaaaatatacttcattcctattctctcccttatcccctgccatgagttaatttttaatataatgccataagaaatattacaattcaaaaaataagaaaggaaccaagctacatcattgcttaatcaacataggataggtttccactgtcaaagtcgaatggagcattatcctccagtggttttgttttgttgtttgtacaggaataaggctgattacattttcctcttttgaattttaatgagaagggggactgtgaactaaaatatattggctacagccactgaaagctacaaggtggcacaaaataagagtgggtcattcatactaacaattttttcagttttgaaacagtgccttttgtcaggcaaggt

SEQ ID NO: 63688 - DNA, 970 bp, Bovine  19866881074985
  misc_feature (1)..(1): n is a, c, g, or t
nggaggctgctctgcctggaatcccatgtgagctgcttgatgcctggcttctgggcctgggaagaccaggagtttccatagagtttcttttcctcctcatcgttagaagcaggggaaatgctcatcactacgtttttgccttaagacaatttgacttagtatagaaaataatcaaaggatattccaaaaagcatcttatattttaacaagatctagtcaaaatcaaagcaaatcaaaaaagcacatcagtaaatatgcataatatgcaatgaatgtgcattgcatcataagtatgaagcaatctgatttaattcaggaagtatttggtgacaggccatcgaggaccagaaagaaagtttcctgcatattttctgtgtgacagaacttgacatcattttacacttcggtcagtttcagatgacaattgttaagctccctctgaacctataagccagtcaactatcatgttaagtaaagaacgatctcaaatctaaaaggaactcaagtgtaattatataagatgcccacattggtacaaagctggggacttgctctttgctgaaatatttggacaactttcccttcgttgttcctgcgacatttccttcaaggttgtgacatcagcaccgtgagaaggaccctgtgcccgagcaggtcttttcctcctggatcattacccatgtctttccttctttttttttctgctaagtagcatgaaatccaagcttggagggtcccatgcccaggcacttgtctgggattgtaattcaggattagttcaatcccagtccagcctgaagtccagctctgacctgccagagctgtcagtctgtcctgatgagttcttatggtctatgaaaatgatttgtgaagagatttgtttctaaaattaaagatgatgaacataaaaccaaggctcttcctttattaaaaaatgggtttctatcaagcctttttttacttccttaat

SEQ ID NO: 63689 - DNA, 2010 bp, Bovine  19866881075358
  misc_feature (1)..(1): n is a, c, g, or t
nagacctggatttcggcaaatgatatttagttagctaaatgtgaatgcgatattgctaaggcttatctgaagagtcagaacacaaatgagacaagaattaaaccaggcttgctggctagaatgcctttaaaatttgttttcagagtcataaaaattgtttggaaaagccagtgatctaataactgtggaaaaaccaaagctcataataaatattgtttatctccagtctcagctcttggtctgtgacagatgtacacacactttgtgagtgtctcagccttgaggatctgctccttaagagtcagacctccataacgtgccaggagcacttcctgcgctatattgtatccttcttcttttaaaaactatgaacactctgagggcagtctagatcaggttttaatctctaagagcccaactcctggcacacagtagatgatcaaaatctgctggctgaacaaatgaacgataaagtggaggaaccgaaggagagcctgtgtgaagacagtgctgtgatccatcatccgagaatgctcttgctggaccttcagctccttccaaagaaccaccgtctacagtgggaaacgaaataggtccccagcttggatgggagcttcactctaacgctgctgccatgacttccaggactgccatcataatctaggacatctgtctctatcccatctccttaattcactttttctatctatccctctctgctggagtgggttttccaacatagcatttcatgacagggtgagtggatagagcagagagatagaggctgcccatccaaccattcgtcttcagtttcctcatctgctaaataggattaataatactacccattaataaggctgtttgaatattgttattgctttataaatgctgagaaatacaaatgtttattaaataaataaaatcattgagatgtctcaaaagttgttactcattatgccttgaaagtgaaagttgctccgttgtgtccaactctgcgaccccatggactgtagcccatcaggatgctctgcccatggaattttccaggcaagaatactgaagtgggtagccattcccttctccagggaatcttcctgactcagggaccgaacccgggtctcctgcattgtaggcagattctttatcatctgagccacctgggaagcccaatattatgccttactgggtgattaatgaaacaagattttatagacattatagctcacaatttttgatgattgcaaactactttactactggcatttgaatcttgtgatggtacactatccctgggtttggtgatgaaggacttgcaaaatcctgccttgaaacaccattcacacagaaatgtgatcataagacagcataccactggcacaaagtctgggctataagatgggctacagaaatttggcctttattttatactagaatgttcacctgggtcaaattttcaatgatctttgtcattgtcattggattagtatgatcgtcaaattgagtgacagcgatttatgactcctgcgtgctctactttcctggggttcatcataatatttgtgcataaccacacagaggaggattttagtacaggaccgcttcagtgttaaccaaacatgccatcaccttgaacctgaatctcatcaaaccgccatcaaagatctgttctgtctggctttgcactgcacttcacatattttccaactgttgcttactcactcaagacttcccacccgagaagagactcacactcctttcgaagtggtaatttttgtgatcacacattctggatgtgtgatcacatccagaaatggaatttgcacaagagatacagagtcacaggcaacttgaaacatgcttacagatattgccaaaatatgttcatatgcaatttcagttttacactgcaaaattagcatcgactgaaccatctgcttgcaggaataaaattttttgagtcacccttggtgatgttaaatacaggggcttccattggagacacttagaatt

SEQ ID NO: 63690 - DNA, 1248 bp, Bovine  19866881101707
  misc_feature (1)..(1): n is a, c, g, or t
ntattatttatattacatgaacggggcttcccaggtggtgctagcgataaagaacctgcttgcctgccagtgcagaagacattagagacgtgggtttgattctgcagtcgggaagattccctggaaaaaggcatggcaacccactccagtattattgcctggagaatcccatggacagaggaacctggtgggctacagtctgtggggttacaaagaattggacatgactgaagggaattagcacacacacatgcaaacctactatatatacacatacacacacacgtatatatcgtttaaaataaatttaaataaattatttactaataactaataaatcatgaataatacaatgtgataaactgtgtggtcatgagtacaagaataaaacactcaagagaagggaagaccccctgtggccagatccatttttaatctccagttcacaggaaaggaaactgaagcgtggagacccagcaggaagaggtggcacagaacctcagaccttttgctttcaacagatctttttgaaagagaaagggaagggggaaagcaaagctgactgacttgtgaagcagaggtgttaagaaacctgggtgccaaccccaaggctcccccggaactgcggtgatgagctgctgacggcagaaagcccctttctgagaggcaggaatagggcccaaagcaggggggcccaggaagcccacctattatcctcctcctccaaggattgcatcctcccttaaggaaggtaaccgtcctgtgtacatttcaaggaggaaagaaaaaaaaaaaaaaacaaaactgtttcctttggaaactaaacactggctctgccaatccaacttcactgaggtcatttgagaactgaggagttcaaaggttctctacagcttcgatttactttggcataagatttaacagaaaaagaactaaaggagaatttatatggcccaggctgttttccaaatcgcaaactgctaaagttatttagaatttactttaacttgcaatcacatgtaaagtggctcagatgtaaatgctttccgtgtggcttaaggcaatctaggtttcctcaaatgcacatgtgcgattctaatagtaaagatctggattcgaaatctcagagtatttacttttgggttcctcatgattagaggctgctgttaactttatgcaatgtcgggtgggagtagaagaaataaaacacgctgccttcatttgggcctttaagttctcacagtagcg

SEQ ID NO: 63691 - DNA, 1514 bp, Bovine  19866881104253
  misc_feature (1)..(1): n is a, c, g, or t
natccatacatgaccacaggacataaagggccaccacaattaggatggaagaaggaatcttagtagctacagtatgtatcataagccaatgatttatgagatgtttttacagcatttttcacgaagtatcagctgcttttgactaagctgttgttttttcctcagatagtggattttgaagttcattcctatcctggatgtgactgaagcttggaattgagaaaaggggatgtggacgacctcttgtgaagagtcccaagccacagccatcagcatgactgcatttcatgagcacctcaactgtggcaaagatacttttagttcatgagtctggaggactcctcacagggaagcagacccataaacacggtggcacattcatactaatcagcttcaaggattttgaaacttatctagtagactacagagaagtgacttggtaacagttcactctcaattcttagtgaaaacacatcatgttgaaaaggacacgaccccatctaagtttggaaaactagtgctttgacctgaatttttattatattaagaaacaaagggacagaaaagggcttcatgagggggaaaaaaatgggccatgacttcttcctgcaaccacagaattccacaaaatgcatgcaaacaaacccatgaaagctctgactaggccatttatttctgcacccagaacaccagttcctgcttcgtaaactctaaatctgcttgggctctcctttcttcacctcctgtttctagacagttcctgttgcacatcctgataatctgacaaaaaagacctcctgatgaggagcaaaaaagaaccattttcagatttagattaccaaggaaaagaaagagattatcaaagatctaaataatgcaaccaatagcaaaacatccttagtaaatcatactaacccagctaaattagatagcactgtccatatacaattacactgttaggctcccatgacagtctttaaatgtgacatgttatttgacatgtttgcaattagggcttaggaaaaaaaaaatcaatttttttctattccacttaaaataaaaaatgtactgtttccctgaaatgtacctttttaaaaaaattcaagacagactaaaaagtaataccagaacaaacatatcacagctgcattatgaagatagacatttaaagtccaattttattagattttatgaaagggtagcacctaaaagtaattaccggtgcattgtatttactttcacatcatcatccttactcactccgcccctggactgtgaacaggcagtgaggtccacagtaactgctggtcctggctgagcttctgagaagctctgcgagaattgcctgtgttcgcgaccacccagcggggctgctgctgctgctaagtcacttcagtcatgtccaactctgtgcaaccccatagacggaagcccaccaggctcccccatccctgggattctccaggcaagaacactggagtggcaagctcctcctttcactaaggccccgagaa

SEQ ID NO: 63692 - DNA, 1042 bp, Bovine  19866881120015
  misc_feature (1)..(1): n is a, c, g, or t
ntagagtattgaataaactctaccagggcacatgttatgcatcatttagcacctgaaatccttggaaggaaattcgcaaaacttcagcactttcaagtattatggattcagtagacaaaccatgtagctcttttgggttgagttcagagctctaagtaagggtggagggaagttgaaagagaattaagtcattgactaaaatgttcaacagtgacaatcccccatccccctaagggtattataggaattttatttcagttcctgtctcaaagtcgtatatctatcatgggattggccacccaagaaaccagtagaaagcttcatcagatggtgtgggggtagatatacagctttgactctaactggaagatggattctcattccatatgattcacagaggtacctagggaggctttataatgagggctcttttttctgtaccgagaaaatactcggtgtgatttaaaagagcaaatgtgtgaaagggcatggacagataatttaacagatagcctttcacagccctgagtaatttaaatcatctcaccaggattagcaatttgaagacaatttttattctaccaagctagccacaaaataaagtaggtaccttataaagaagcttcttgagatcaaagacttatttgacaaaatgcctccacagagcctccttctagtgctgtgcacacagtaaacaatacaggctcactggatacatattgaggattttactgccattattagaagcgatggatacaaagttcagccagctgttttttcttggttaatgaaattgttacatgatccaagacattcaaggaaaatatgattttgcttagtgaataatacttattaagcactttcatttataaaaataccactttcttcccatggttctttcaacagtgaaagtacacatttcctattgagcgtgtggggtgggttcaggcttcaggcactggcccctctggcagcggccacgaagcagtgggacacgctaccctgcccggacaagccattaaagccgcctgcctcaaagaga

SEQ ID NO: 63693 - DNA, 2270 bp, Bovine  19866881145613
  misc_feature (1)..(1): n is a, c, g, or t
nttctaatatttctggaacttgatgaatgtgaattgacaaagtacagtatatagctttatatcagcattactgaaaatacggcaacggtgtatataatcattactcatttcttttatggggcatttattacttgacctttgaaacctcaactcaaaaccttggcattccaatgtactccaaaccagaaggagagggaagagttttcttatgaaaaatagcaatgaaacaacttaattctaatggagagagaaaatattgaaataaaaaaaagtgtagtattacatatttgagaaaaaaaagtgggaaaactgaacacaaataactctggtcacactagccaatatttactttaaggaagaagctttcattttaaaatgtgtatcttcctccatagatttataccctagccattttttgatggtccttgtcatagcacatggtcagcaggaggagagtggtgtctttatccagtagtgcatgcttgctttgtgtaaatttgactaatgggttaagtaattctcactaaattggcattttctctgaatgataggagtttgttttataaatgacgttgttaattattatgaacatgttttatagccctcattcttacatattaagagttttaggcagttttaatgaaagagttctactagttctccttgataggatgagtgggatgtgatgaaagcaatagtcacatggtggcctatgattcaggaacatttcctccttgtcacacagacctgctatgtgactgtgggcaactcatctcccctttctcagcccaaagtatcagatctgtaaaatggaataaatgttccagtctaccttctaggtcagttataaggatcactgaaggttgggaaagtattttataaatcaaaataccaccagatgcatatgacctggtcattagctgctgttctttctttgtgtttaggtggtggcagatgcttcactcctttgagagtattgctttgtggtctctattctcaaggctggatttagctggagttgagagtttacaagtaaaaaggttaggagaccacactggtgtggtccttgctgtcctcctctctggattgggaagcagtgcccagaagccatggctgacagtgctccctgttgatctgattccccaggctgccatccacaaatgtcccctgcccctcatccaggtacatttgactgcacagatagctcatgtacctggaccttgttcaaggttcatgtgcatatgagatactgtgagttggggcctcttctagctagaaatgtcagtgtcttcagaagtcaagcagttctacatggtaggtattgttcagtaagagggctgaagccacagcaaattaaaacacttcctagcgggcgacagtcccatgggttgcaaagagtcagacatgactgagtgactgagcatgaacaacctgttagttacagaagctccaggagtgctcttaaaggtgtggtaggtacctgtgtttgtgttaactttagcaaatggaaaatgtaggactggaaaaatgcttccttactgttttttctagagaatattcacatttatccagcattttcagtattttattttttgatagactcatcagaggaacaaaaaccataaatgactggcttattgctacaccccatctatgttatttccaactttttttttttctctctctctttgaacaaaagttgatttcctgatgtgtacaaagctttgtgtaagatactgatgggtaaaagcttaaaatattaaaaatgcattcctgccctcagtgagcttgcaatcttctggtcttatagtcttagcaataatgagtttccaaacgctgcacatattatcctgtggtcacggtccatgagcaggttagtagatgaagcctgggctgacgtgtcccatctaatgtgatggcctcagaataagctaatgctttttggactcttactgtctgcccagcactgatttaagtccttcacctacactagctcatttgattttcatatgagccctatgactgggactgtcagtagcatcattttttcaaagaaggtctcaccttcctgaagagttaagtaactgcccagagtcacttggccagcagacatgaagctgtgattgtaactcacacacattggagctgacacccacaggcgtgctcttaacctctgccctccaccccctctccagttcctattgactaggatgacttctattgcatattttcattagtaatactttagaaattcccctctaacaattata

SEQ ID NO: 63694 - DNA, 854 bp, Bovine  19866881174364
  misc_feature (1)..(1): n is a, c, g, or t
naccattatggagcaccatcactgagtcagacactgtgctaagaactgggtttaaagttggactcagtactgtcagaatgagccagtaacgtcttcaagaattcctctcccccaggtaccccagacactgctgtcgcctcatttcctagctctgtggacaaagctaggggttgagagtggagactactgctcttctgaaaggtgatgctctccagtcttggcaggagaaaaaaaaactggtgaggaaataaatagtctaaccgtccagatttatttttttgtaacttcgagcagcaccaaattcccaatgaattctcaatagatgtctgttgtcaagggggctgtgaaagatgatcaaaacacacagccctgctccaaaaggcctgccagtcgcgtccaaacacactaagacatgcgggcctctgctgcgtcctaagcacagcaaacatcgcacgctggtcctgacagaaccatttaccccgtacacttaagacaccgaatccggtcctcaggctcccaaagttgcccaagtagaatgtgccctttctctgtcacagcattttaaaacagaagagagcaagcacaactccagaagtcagtcacttctttctttgcagataagccttaaaagttctcttggacttttttttaactgtttcacctaaaacgcaattatatacgttctgcttcacaaatcactgtgttaagataatttcgagacagaacgtttgaaaaggccgcagagttgaagggcattctgttagcaagtttagattatatgaaccaattcactatttgaatgggtaaaaaaaaagacattcaagagatggctttaaaaaaatttaagaaggtgt

SEQ ID NO: 63695 - DNA, 669 bp, Bovine  19866881183167
  misc_feature (1)..(1): n is a, c, g, or t
nttgtgtttataattatttgtgcttttgtgttttagaagcttttactctggatctcggtctcagggcctccttgtaaaatgcttttctttgaatagttaatctgaggtctttatctttaacattctgcatctcatattttatgttagttatttctctggcttaatgacactctggccggtgttgactcactctaaagaaaggggctgtttacttaacagtggcatgcagtctgttttccccaaacacaatctttgaccagagaatgggttgagtagtagtccttcttcacataagctgcctggaagctgtccgttcagccttatctggtgggtgacttgaagtgtgggctcattatgcttgcatggcaaattcttaagtcacagtcctttttcttagctttaaactatacggaaaatttactagctggccttaattttgttattggggtcgatataacttcaccgtgattcctgtactcatttgctcggtaaatattcaaagattgcatttgttcccccagggtaaacatctttccttgctcctcaaatgtcacagggaaagacctctggtcctgccatggcttctccatggaaaagactctgtctcctgtgacagcgatgtttttaaaatgtagcttccaccttgaagggtgattcagtatggacata

SEQ ID NO: 63696 - DNA, 1112 bp, Bovine  19866881237337
  misc_feature (1)..(1): n is a, c, g, or t
nactgatgatgttattttcttattttgcatctgttattgtgttctactctctgagtttaccctcattttctaattggatttaagtagctgctgcttgtttcacagatgcaatgccttcctgtatctctctgagaatattagtgatagtcttttaaagtttcttttttcctccttgtttctgtttcctcaaaattaattttccatttttctctctcgtgtattagctgctttcctcagatacttgttaatttttggatgtcttctcaagattagcagtgggaactgaagctgattggaagctctgtcaaacttaaaaatgtttttccaggtttcttcaggtataattgacaaaaactgtatgttacacacccaatctagctggctatcaggtcctgcctcatatgaaggccgccagcagttgatgggtagggctgtgtcccagtggggctgactacttaagactggtgttgacctactcctgggtgtgttaagcccctggtgttggtaggctagagggaggattccaagatggtgcttgccagcatcagtgcccctgtggtagaaatgagctccccggaatggctactgccagtatctgtgttctcaggtggagtaccagttggtcctccaagatcaggaggagtgtctaagcctcctttcagatcgttacctctgtgctgggacttggagcatgtgaggacttgcatgtgccctttaaggagggtctgtgtttcccacagccctatggctcctgtacgcaagccccattggccttcgtagccagatgttctgagtacctgtcttcccagtgtaggacctccaggctgggaagcctggcgtggggcttgcacccctcactcctaggggagaacctctccagttgtgatgatccttccatttgtgttgttgcctactccaggaagctgggtcttgactgaagcaacactgccccctctacaaggtctcattgtgggtctgtctttatacttttagcggtggaaggtcttttccactagtcttcagatcattctcatcaatagttgcttgtaaatagtcttagttttttgtgtgtttgtgggaggagctgagctcaagttcttcctactctgcca

SEQ ID NO: 63697 - DNA, 1125 bp, Bovine  19866881238300
  misc_feature (1)..(1): n is a, c, g, or t
nttttaccagttaggaagtaggcactaagttggcaaaggagacgaattctgggaatgaggaaagtgaaagtgaaagttgctcagtcatgtctgactctttgtgaccccatggactatacagtccatggaattctccaggccagaatactggagtgtgtggcctttcccttctccaggagatcttcccaacccagggattgaacccaggtctactgcattgcaggtggattctttaccagctgagccaccagggaagcccaagaatactggagtgggtagcctatcccttcctgtagcctatcaggaagatctccagcagatcttcctgacccagaagtcgaaacagggtctcccgtgtcacaggcagattctttaccagctgagctaccaggaaagccccgaaatgaggaaccagcctgcaaagaattctccctagtttgtttcagcttctcactcttgttcatgtgtaactaggcccagtcttcctcattaatctgagagggataggatcaacaaaggcaaagagaaggaacaggattctatgagttatgccatgtttgtgacagtctgtctcttgctgggaatgaaatgtcaaaggacacctcctttgttcttaggtgactgcttagaagtctgaaaggaagggttgttggctataattgatagtgattttcctagtgaagattcaaatatagcatttctgtagtaacagagatctgagacctttggcagtgagcaaggggttctgtttgggaagagcattttctctgggcttagctaattagttgcagaaatggtctcatgccagccaacactatacctgggttctggcacattctcagaactggtccagttctttttaagatattaccagtttcttggattctgttttaaccaagttttgtttagttaagcaagataaatttcctagacaacaggtgatatatattcctacattttcttagaatgtagagaatgagattaattttaaggagaatattcctagccaatgacaggaatatccaagtattacagcaaagaaacattgcagatattcagctgagaaagatttttaaaattatactcattaataagatttttgtgtttaatattgtaatacgaagt

SEQ ID NO: 63698 - DNA, 720 bp, Bovine  19866881266004
  misc_feature (1)..(1): n is a, c, g, or t
naggccctgtttcctcattttaaaatgtggcagaatgggtgctaagggatggcgaaagtgaaatgaagagggaaggaagatttcttagaacaaaatacatgataacagattaaaccaaaccacagatatccttgcctatcggtgaccagttcagttatgtgtcttgtatttttgttacaggaagacaatgggaaggctaaaaagacaaggaattccttaaaagggtgtgtcctgatatcacatgaccaagaaacctacaaagactgctgctggtgtgtgctctaagctgttcagatttacactggtcatcaaggtagactcagtctctccaatgtcgctgggagctaaaggcctataagcgagggctgtcagttcttcccgatgttggatcattgcgtggaataggacccaatcttattgagcaccgttgctgaaaggctagctgaagtgacactcactctcctagcactcaatcaaaggtcagtgaaactgtgcacacactcctttctctctcagtagatcaatgctgaaagaagaatattatcaagggccagaggggatgagaaggtaactcttcttgataaaattagctgttccagggcagtctgttttaaccacaaccctctgcatggctcctcctctcaaggtttccttgtctgggctattttcacctatttttgcagaaacgcttccccacactcaggagggcatcctaggctt

SEQ ID NO: 63699 - DNA, 854 bp, Bovine  19866881295552
  misc_feature (1)..(1): n is a, c, g, or t
ntactggagggagaaggaaagctggggtttgtttagttgagaggtcagggcgaagagataaaaggagagtgagtgttttctgaccttcccctaatctcttccccacccagttggaaaacgcaggtcctgtttgggaagctcccgagcccagtaacccaaccagtgggattttcctgacaccaagacacactcgctgtgatggcctcactgtcaatggccctcgagcgacttagatttcagacccggtcctcggtgggagggaggcggctcggcgtcagtgtgtgggcttttgtgtcgttctcttttgctgtctttttgtgtgcaggcccaagccccatcccggaacacacatgatttagctattttacatcatccgttatctagtgctctgaaactgagcatagagccatatattagattgaggttaggagaggtggcgactgtttatttaaggtgataaaatggtccatcagcagtaatctccatcgatatgtgccaccaggagatgaaggatgaggggacaagccacaattaattgccctatagttttgtaggagagagtggagccggcccagacccgcttcgatctcctcttgcgcctcctattcatcatcttcgcattgtatatggcggcctcgcaggggcaggggccggtgaggtttatctctgcgcaatattctctcgccctcacacactggctctcccatttaatttattaatacagtcatcgggagacaaaaaaaaaaaaaaaaaaatcacatttcctctttctttccctcccccttttgtctctccctcttggtcccagggccaagccggcagccaggccgagcaggggaagcctgacgcggctc

SEQ ID NO: 63700 - DNA, 1046 bp, Bovine  19866881345690
  misc_feature (1)..(1): n is a, c, g, or t
ncctttattaggaatctgaggctaagagcagatatgacctgacaaaccttttacagtctgttcatgatttaacccaggtcttatagctttggattcctagagacagactttgccattttcagaggctggcctagggagtgtcgtgtgtaggttcctagggacatgttcggattcccgcagacagacttggccattctcacaggctgccccagagagtaaagtcctgtgcaggtactgcccgctccactttacttcctgcttctgcaggcctttcagcctcagacatgggggccactcttctcggcaatggcagctcctcccctcctatgttctgatgaggaggctcccccagattctgcccacaaatcttccccatcttgggccctttctttctacatgcagcaggaaagacccccaccattgtcctcattccagcagactgtttcttcacggcctggttctccaattctctcagctttctctgctaccacatttctttcagctttgaatccagtatttgtccccattcccgctcaaggccctgcccaccccctgctctgtggagccccgtaaccctggtgggactcatgattcagtcaggcacgactgaaaccaagcaggcaagttcctcagctctactgaagctagcaattccttttcagttactgagaggatttgaggagagaacatatgcacagggtccagctcagtgccaggcttaatcaatccgagctccctttccccaccagagtggcctggagctcttactcacatttcccagcacttagcacactaatataattagcaacattagtatatctaaaaggcaattaccatttaattgctctggccccagccagcctgaagttgctctccagtcacttccaatttggagctagggtgttttcagtcttacccaggccaatcacaaaatcactgccttggagagaattaaaacaacctacaggcagccattgattacgagataaaggatttggtaatttcctccatttcgttctatataaaaatgcacatatcaatttgtt

SEQ ID NO: 63701 - DNA, 1208 bp, Bovine  19866881352039
  misc_feature (1)..(1): n is a, c, g, or t
ngtgcaaacttatgctgtggctctggaaatagttacggcacagaggccttgtaatgacccatgaaccaaaattggaaacaaacaactattttgctgaatgtgtcctctctgacctaaacccaatattaaactttttacagaactataaatcaaatccattaaaaacaaaaaacccagtgaaccagtctgaactgaatccaaacctacatattttctaaaacaactgaactgtaacaaaactaaaacatcaaaatattctccaacctgaatcgatatttcatttggttcaagtctctgaaccacattttctgtttcaagacaggattattgttgttaaccatccctttaaagaggaaatacagaagggaagttaatgccatagttagcactgagtataaataagaaaagtatgttgcaaaatgtatgaaaaatatgcattttataaataaaaaattatttaaagcaaagcaagaaaaaaactgtcaaaagaggaaaatacaataatcaaatctgtgaacaactgagaaaatacaggggaaccagtgcagatcaccgtgaggaagctgtaaatttcatgtagaatgaactgattccatgggatgggagaggaaacaagcaagcaaatatacattaagtactgctaacatctgcttatagtttagattgcaggggaattattcactttaattataattttccttactttttggtcatttttgttgattatgaatggcaaggagaagtaagtagtaaacagaaaaaagttgggaagtaacttctggtctgtatgaataagaaatgataaaattcaaaaatgtattatttgaacctttaagttatcttagaataaacatttggatgatttttggaagaaatttatgtttaagagaacaattctctaatatccaaattttgcaaaattttttttgtggtgtagaaacacgaatatgtctctaaaaataatggaaacttaactgcaaattatatttagctatgctctggcatacataagtacgcatacagaagtatgcatacaaactatgcataaaagtatgcataaacactaatctaaaaaagtctagctttttctgaatagcatattattagggaaatgatcacagggcatagaatctgcagattcatgactttttccaacaatcaattaagacaagtgtcttaattcctaaaggaatactaccatattcaaa

SEQ ID NO: 63702 - DNA, 1073 bp, Bovine  19866881378312
  misc_feature (1)..(1): n is a, c, g, or t
nggtgtggctttagatctgggatgcccactggcttttctgcccctcccccactctaggcctccctatgagactctgggaactggggaggcttcacctcatctccactcacctttgggatttgccaaaatatctcaggggactggtgccttctctgtgctctggaaccaccccatccccctgaaacatactctgaatggccgcaggaccagagccaaatgctttggcacctttcaagggatcaggagaggttactatgactcagtcaaggctgttgagcacaatggttttaggaaagcagcctggggagggttgagacttcttgatttcccatgcctttgtgcaactcaaactgtttcctctgagagacagccagactgaaggtgactgaaagcaagtgacttgggctgaatctgtgaactcctgtttgcgtgtggacacatctgctggggaggaaatcactgcaagtcagtgagttcactgggctcactcaggccatggtgaacattcatgtgatgatgtggaagtaactttttcatgtgcagtgagtgaaaaaggccttctcctagcatccttattcctgaattctcaagaaatgactgttacaagaactagagagatatcacaaacctagcagaaaaaaaaaaaaaaagaaattcctgccagccctgcagagttcttcaggactctgcaggattttttcaaaactagcagcaagcctgaatttatatatgcaaggcaaagggcttcggctttgtaagtggtaaatcaaggtatactttacctgtactgaactactgttagattctgttctccgcagtgccttgcacatcggatatacctcatccagctcgacttactaggttccccaccatcaataaagtgctgtagtgtcccatcttggtcatatatctagagaagaggtcagaaggtcaagtagttagaacgaatcatcagcaatcatttcccctgcttcccttggtgtctttatgtgttggctgcacccatttattgcccataggtttgctagtgctcaggaatgcttgggaaactcaactagaaaacaggagaaaaa

SEQ ID NO: 63703 - DNA, 1002 bp, Bovine  19866881378932
  misc_feature (1)..(1): n is a, c, g, or t
ntgactgttgataatatcaaatgtctggtttcttggtagagagagattaggatatgcagctctgcattcagaagttcttgagggaggcagtggggaggcagggaaagagtttatgccagaggcctgggctctgccagctacaaggcaggagatttggggaaaggcactttattcctgtggctcagtttgctcaactataaaatgaagggagttgggtaaaatcatttttaagatcatttatagctttaaacttacatgaataaatgtgtcaaggggatatagactttgcccaggtatccacaaataaacatgtgctgtgcttagttgctcagtcgtgtccgactctttgtgaccccatggaccatagcccaccgggctcctatccatggggattctccaggcaagaatactggagtgggttgccatgccctccttcaggggatcttcccaacccaaggatcgaacccaggtctcccgcatttcaggcggatttatcatccgggccaccagggaagtccaaaaatacaggagtgggtagcctatcccttcttcccgaccccagactcaagctagggtctcctgtattgcaggcagattctttaccagctgagccaccagggaagcccacaaataaacatcaattcttgaacaggctattgagagccataattcccaccatgtaacatcattccatgtaacagaataattaaaaaagtcaattcctcaagtctaaacccgagttagttggtcccttggccacaatacggagatgaggactcaagagcaattcctttgactacgagtagggggcgagcgagtgctgtcccaagccagaagaatgggtgtcccaggctggcccttctggcatcattagggttatttgttaggccaataagtgtttgcaaagtaacttaatgtccaataggtaaacaacaactcttacccataactctctgtctttggtagagagggcaaatgtcgcacatttaggaaatcaagaaa

SEQ ID NO: 63704 - DNA, 975 bp, Bovine  19866881401689
  misc_feature (1)..(1): n is a, c, g, or t
ntgtgagacttttttttttaattgaagtatagttgattcacaatgttgtattagttttttgtgtatagcaatagcggaccaagacctttgacctaattttttattagacccttaaaggaaaaggaggaagaatatcagacaagtccaggtgttactgaatttattagtagaagctgaccttagaagaagtagaaagttgtggtgagttaagaagtaaaaagagacatgaatgcagatgcccctcttgagatgttcagatgaaaggagagaagagatgggatggaatccaaagctgggatggggttttttgattattgtttatttggctgctcggggtcttagttgcggcatggggcatcttccatcttagttgcagttgtgaactcttagttgcagtatatgggatctagttccccgaccagggattgaacctgggtcccttgcattgggaccacagcgtcttagccactggaccactaggaaagtccctgggatgggttatatttgtcgggttggtgagacttgaggatgtgtgtggtcaggtgcaaaaagacaagactgatgggtttaatccttagacaatagagtagagatatagaccaagggacttagggctggagtcaagctgggagagggttggggggagttttccacaactgcctgccaaggaactgagcttaggctgcagagacagtgcatttggaattccagcctttggcaaagagccatgtagcaccttccacttacaagcagaaagcacctctatgactgtcttacgattttaggaaataagtactcacaaaagctggcagttataccagactttgtagccttcagactgggttcatgatttcatttgacctatgctaaccttgttacacacaccatacacacacctcatatgcatacaaacatatgggtatgcttgtttatacacacacttatatacatacacatagaactatatatatttca

SEQ ID NO: 63705 - DNA, 1585 bp, Bovine  19866881463348
  misc_feature (1)..(1): n is a, c, g, or t
natggagatctgttagagctccattgtgggacctgctcttcaggcaaccttggaagtatttccaattggagtcccagaatctccaaggaagctcccagatgacaccagatgacatcagcctggggaatattggcctgagtctcagaaaaagaagctgcaaccaacaaggcagatccatttgtgagcagggaaaagaaagagggcaaatatccaaagtcttccttctcctaaaaacctgaaaacagcccttggtttctctgaacttgtctgcttctgacattagcggtgtttcttctttacaccccatctaaaccaattcatatggctttaatcccataccaggccaggacaggaagttcagccctttccttcctcaaccctgagggggcccttcccttgctctggcgatggtccaccctcctttatcatttattacttccctcctgactctctgtctggcccacatgagaggccgtgcctgtttctgctggccctgcccgctctctgtgagtactgtggccagagatggaaatgaggttttcctgcacttggaagaaacagcacacatgagaagcagttgaggttccagcgggggtcaaattgggtagaaaaaattacaccaggaaaagcactgctaatttagcataggatggtacagttttatgcttagttcttttaaatttttattatgaaaatattcaatagataacacttgcagggaaaagtataatgaagtcttctatcctccacacccaggtaaacttagttgaaaacctgctaagattgaatcctaatggtctatgtttcaactactgttcttttggatatgtgatggggagaggtgctgggaacacaagattccagagtacctctgatgccttttaattctacttccggaaatatgagattaaacccacatggctataaacaactacagtgaaaaagtgaaaactggcctagacatcatgcaggctaggtttcatcattgattcacattgatcagctatagaccaatgtttttcaggtgatacttaactgagtgtgtgttcagcaaagtaatggccccaaagatgttggcccctagtcctccaaacttatgaatatattacatgttacctttgcagatgtagttaaggttacgcacctcgtcatggggagagtatctcggatcatccggatgggcccaatattatcatgtcattaatagtaggataagaaagaaagacgataagagagatgacagcataagaagtatccaaaaccctgtggcttgttctgagatgtggcaagctatgtgcagcgaccagagagaagcttctccaagttaagggtagtcccagcaggcagccagcaaagaaactggaacctctgtcctataaccgcaggaactggagtctgccaacaacctgaatctggaaccttcagcaagaaacacagccccaccaacaatgtgtttttatctggtgagtccagggttgaacgtctgacctacaaaagtgtaagaaaataaaggtgtgcggcttaatacattaagcttgtaatctattatggcagcaacagacaactaatagaaacatctacaggg

SEQ ID NO: 63706 - DNA, 818 bp, Bovine  19866881509950
  misc_feature (1)..(1): n is a, c, g, or t
ntagtaaaaactttactagttttccttagaatgttcgacttcagcagagccctaaaggttaacctgaacgaaacaaattcaaaggactcataccattgcaaaactacagttactgtgtgagagagggtttacctgtgtgtccacacagccacagagaagagatgataagggtacgtcacaatcatgtggaacatgagtgggtaaatgtacatctgtgtgtgataagataaccctctatcagaaccattcctgacatttgggttttcatatctgcctttttcctctaaagtgcatctcacacttcgctctgctcagtgccactgccaatgaccactgcttccctttgcacttaggattctagaacaggatgtcatttgattaaccaataaccatttattcactttttaacttagtagaacaggaaaaactcctcaggtctaaaaaaaaaatctctttgggcatatactcatgaattaaaaaaaaaacatcttagatcatagaaaaccacgtgagctgtcacagagttcagtgtctgaaactgatatggaaaagcaggatttcccagacctcagcttgctcgttgatgatttttgctttatctttacaatatctataccattacctacctgatgtcccattttaaaatgactttaattctatttattcatattatttagcctcagtgtaaacaatactatttataaaactgtgggggtttgtttgtatattactgctgttactactttaatactactaatcctgtaacaactgtaatactaccttaatactactaatatggtagtattgaaaacattttt

SEQ ID NO: 63707 - DNA, 1364 bp, Bovine  19866881719585
  misc_feature (1)..(1): n is a, c, g, or t
naaacataagctgctatcaatcatgtgctcagggcattatgtgaggtttttactcagaaagatgtcattaaaagttgcagaaattaattggtgccattgaatgtaatggcctttcctgccatagtttctcaaatgtaaagaaaaattatggataacgtaaactccttgtgggattcttatagatgtctgctttgttctgttattgtttattgcaaatgttattactgtgatctatggccctatcacgctttgtctacactgcgctgctcttctgcagcccacaacaacggagggcttcactcataagtgtgggctgtgtttatttggaaattcttcgctttcatatattcccaaagtgtctcaaggtgttcatttcgtgtgtttaaatttttatacaaaaacagatttgttctgattgattaaatattgacttacaccatttttagaacaactctgaaccttatttaagttcagggtttgtgttccgcttccccagaaggtttgaaatcagtgtaataatggcgattactttgtgtgaatcaatggattgagatccgtaatctttctcaataacaacattggtttaattagtagtggtttaaaattttgacccttaattaaagaacaattttatgtctctgtaaaaacatgtttaaggaaaatgaacttttttgcatattagatactatcttaatactatataatcactaaacattaacctattgcttctagatatcttgaagtcatttgtggatgcctattcttttctgattctatgatacaaaattctagaaattcatgaaaagggacagtatgccccttggaaaatgtaatgaattaagcttacaattctattttactccatcttttgattgtattttgtgaaattttagagcatttctgggttacactgtttaagacatatcttcagaattttatagttgagatcatgtcaaatattaaaaagtctattgtaaacagctaaattcaaggccaagatggttcattcattcacatatagggaaactaatgaaaacaaatgttagcatatataaaaataataaaactaaactctaaaaaaaataatattttgtttgggattgtttgatgatatttaaagcctagtaagttccatagcatgtttggggaaaggctattaaataatgaatagctttatgttttattactaaaaatatgaataaaaatagatataaaataatagtgaccactaaaagaaggtagagtcatcatatagttttcaaaccaacaaaagaaacagtaggagaaattttttaattttttaacggtccaataaaatgcagaaaaaagaggggaaggggaagcaagttaaaaaataaacaaat

SEQ ID NO: 63708 - DNA, 1366 bp, Bovine  19866881748169
  misc_feature (1)..(1): n is a, c, g, or t
ntctatgtgtgtatgaaatgatgattaaaattccttaaaaaaaaatcttagctaagaaattccctggttgtccagtggttagaactccctgcttcactgcaggaggcatggattcccaccctggtgagggaactaatatcccacatgccaagtggcatggcccaataataataaataaataagtaaacataaaagaagggaaagcattttaaagcctttaaaaacaaaaatatcttaacctaaacaaaatttcagtggagttcagataaaaccatatatacatagacctcatcttgagagataatttctgagcacttgacaatggagagatatgtaagtagacataatgaggatacaacacacagtactatttcagagtttatctgcaactcttgctttcaatttgcccatgttatttataggccttttttcacatctactgtagctcatgaatgaacttctaagggtcacatttacttgataaagcatctagaagctctttcaaactgttatacttaaaatatcaaatgcaattgtccacattcccatttgggatcccagtagcatcttcttcttcttcctaaaagacttcgcagagctttacctgtagactcacagacaaaacaggttttcataataataaacttacagtttaaatgctggtaaattcccacagtagctgttttttgaaaactttttgttattttcctctactttaaaataagattgtgtaacctgttttatttatcattgagataggaagcttgtaaaaattatatgtgttcaaggttttgaaccccagagaaaggcaccattcaaagttatgaggattataacaacgaatgcaattccattcctcatatatgtagttgaaatgtataaacattcaaaataaaagatacagaaaatgaaatatgggttaacagtggctaatttttttgcagctgatatcataatggcaaatgtttttattcctttagtctgaaactttggaagtagttttcataacattatgaaaaaatgtcaaaatacaaagaaattgttaaagttctggaaaaatccttaagatactgatggaaccctattattgcaactgtggctattttcacccagtgattagaaagtgccattatgagaggaattactggttgtaaaaccaccacaaaatacattgacctaatggcagtttctcaaagctaaggcaaaatgttccatgagcttctctttattgattgttgttcccatgcgtacctctgggaacaaaacagcaaagaaatgttttgatcggagaaagagtgaccttttctatggaagggttttaatgctgtgatatgctgaaataactaactgaaaggataacaaaggg

SEQ ID NO: 63709 - DNA, 916 bp, Bovine  19866881927410
  misc_feature (1)..(1): n is a, c, g, or t
nctggaagggagcaggcatgagaatgaaataggaagggaagatggaaagatagatgttagaagacgctgctcagtctctgaatccagccatgcctgaagccaatctccacccccagcttttcagttacccaacctattacattccctcgtttgcttaagccaggatgaattgatttcttgtgacttacaacccaaagcctttgtctaatacagcaatattggaaaagttttatgtataaagatgaagattacagcattatttatgctagcaaaatactggaagcaacttgaatgtccctaaatggttgtaaagcaatagcatgcattcattaagactaatgctacactttttagggaaaaaaggagaaattctgtatgcagcacgatctcaattatgtaaatacattcttataaaacaaaatcaacaaaatgtagagtgacataaaacaaaggccaatggtaggatttttaaaactcttttctgtttgtaatttttaaacttttttgccttctaacttttctctacatttctttataaactacttagaaaaaaaatattaaaaaaattttagaggtaacataggaggaaattagaatcaaatgtcatctttacataaaaagggccttaagtcttcaaatgtcagaaagcacataagccattgctactgccccgcacaaagaacatgtacttttcactgtatttgccatctagttttttcatgactatgagcataatgtgatttctctactgaataaactgttagggtgtctattacagcagatgaccaatgagttaacatcttccccctggtagaagccatttatcctgagggtcaggctgtatactgaaaatgttagcaaactgatgactccatataaactactactttatgaaagcctatgctttctgcaagag

SEQ ID NO: 63710 - DNA, 654 bp, Bovine  19866881940253
  misc_feature (1)..(1): n is a, c, g, or t
natgtagttgttggtctacattcattagcttagcccatgttctaagcaaaaaggtctcatgttaccatgaggttatagcaagaagtttccatgcccttttgatttgaataaaggggatcctaattagggttttatagctctcatattcctcccttctctcattcctcaaaattcaccaaatcagatacaaataaaacatgataattaggcaattgacaaaaagtagagctttacacacactctggtttgggatgaggaggccatatctataaaagataatatgtaccatggttacacaaacatcttccctttttggattggattactacaaacctaaacaggttcagcaacagttgttctgaaacaactaaacacatttgaaacgaggaatataaagctgagagtgaaatctgagcttttaaaatgtgcatagtcatacagaataaatagtccagtgtgagtactgtgaatggcaggactaaaatggtaagaactggagtcttgaaaattctcgaacacagatgggccagtggttttgttttcaagctgaacaaaatagtctctttttttggagttcagaatgcatttcttccctttgaatagctgtctctaaaaaaaaattattggagtgtagttgatttacaatgttgtgtt

SEQ ID NO: 63711 - DNA, 691 bp, Bovine  19866880456132
  misc_feature (1)..(1): n is a, c, g, or t
ntgttgtctatccttctaaatgcatagtttgcatttaccaccccaactcccagtccatccctccccgaccccctccccgccttggcaaccacaaacctgctctccatcagtctgcttctgtctcatagataggttcgtttgtgccacactttggatttcacatgtaagtgatatcttacggcgttcgtccttctcttcctgacctacttcacttagcgtgataatctctagttacatcaactaccctgttcactgctgacctcccacacttttcagctgaaggtggcatcagctacaagctgcaggaaacaagagaacaagtttctgctttgatagatgatgcgtgtcattatgccagatgaatatggaatgccttcaactgtgaaggaagcaggaatctgcaagatcaaactaaacccaaaataaaatcgttgtgcaggaaacaatttaagaggtcggtgcgggttctcccctcaggtatgcaaacatggcacagttgatccagctggcatcagtcagcctgcctgattgttctttaaaaagcccttgttttgggttccattgtaacctgcgcagtgatgccatatcccttgtaccagcaacagactagaggaaaagccaatcttctgcactaaattgttaggggcagggcatgcgtgaaccctggctttgaagcttcattaaggctctg

SEQ ID NO: 63712 - DNA, 1297 bp, Bovine  19866880845307
  misc_feature (1)..(1): n is a, c, g, or t
ncactctttcttacacccatgatatataatttttcagaacacaggaagaacaagatgtcattcacacatctgaacatttagattgccatactattaatctgggttttggaaagttgagaacaaaggaggactccctgttttgtctggtggtggtgaacaattgatccatactcagtctgaaagcctcatctactctctgtactcatttatcagctgtcatggcatctagcttgctgctgagaaaccctgggtgacgtctaccatgtgaactctttcaggtctggggtcaccgcaggcagcaatggggacctgacacctcaactctacaaacccacatttctcttagaattgactgtggaaggttttcacagaatgtttctttcatgtcgcatgcctcacattaaatattgttaaaaaactaaaaaccgattctgggggtacaatttacaagtcttcatataagaaggaaacgactgaaaaaatacccacccaagcacctacaactcatctagcgaacaaggctactaatacgtaggcggtgcccggagaactccgtgacttgtggaaaagcggggaggtgcggtccaccctctggaaggaagtgagacgtgctgatgcagagagtgctgtcagtggtgcttggcttcctaagtcaaattcggcagctgcgtttcagagtcagtgtcgttacttatttcgacctaaaacagaaaatatgaatggctttaaaagacttcaaaattgaaaatgaaatttcctttctatttacccgggctttataaaaggcaaaatgtgacttgtgctgtctgggttcctggctgtagagtcagcaaccaaaacaccagggttccctgcttttcggatcagggtgggtgagcaggtgtaaacatcagagggtggaacttggcttcctgggaaggaagtgccagccacaagaagataagggggtgaagtaagggtgttgtctttggtgaccttggggtaaagacgacagggtggtgttgtctccaaacggccagatacgcccctaacctaacctataggcttctgctagttgactgctcaagaatcataaacacataggtggctttcacaccacctatggcccttacatacatcccactctgtgatggttaattaaaaaaaatactttaatttatttatttttcactgtgctggctcttccttgctgcgagcaggcttttctctagttgcggtgcacagacctctcactgtggtggcttcttttgttgcagagcacgggctttagggtacatgggtttcagtagttgtggtg

SEQ ID NO: 63713 - DNA, 935 bp, Bovine  19866880853293
  misc_feature (1)..(1): n is a, c, g, or t
natttcccagacattcttccctggaatacggtggtgaagagtactccatagaggacatctgtcaggagtggacaaattttataatgaagtcggaaaattatctcagcagcatttcacagacggttaaaggagaagttgttacttgatgtgaaaggtttcctgattaaaaattcatgactgagatcctatctggttatatgaatgaaaggaagggaatctttaaattaatgcttttctgatttttttttttttaatgtaaaaatcttttaacttgagcaacgtgggtatttgggaaacttctttactttttaagtatcttttctttaccttagaagtaattaaatgttagtataccttaaaagcatagaagaggttccttttttggcatttgaaagaaagttatctctgaagtaccgtcatgtgtacatttgtgtttacggttttatttttaaaaacttttctggttatataggtttaattataaatgaatacatagtccactgaagagaaatattagcacaaatcaactgactataaaaatctattcacacttttttaggtgtgtcagatgagactataattcagattgaagtctgagtacagttttacatagttatttccacgggccaccaagctagttcacctcagggaaattctatttagcatatctgcacaatagaaacttttgaatgaagtccatatgcaataaactattatacgctgcatcaggtctctaggaaattattcatgttgatacaattaactccatagaaattcagagatggaataatatttggttgccatatacatggactctatttttaactaaacagtaacatgattacacaaggggaaggaaatgtttacattgtaaaatcagtcagttacatctggaacttttcagactatgcataaatatttaggttttactatat

SEQ ID NO: 63714 - DNA, 1384 bp, Bovine  19866881014087
  misc_feature (1)..(1): n is a, c, g, or t
nttccaacacagtcactcatcagtttgctggaggtgctgccttcttgtaattctcccccacagaggcataaaaatacaagtaatgtatatgtgtatctgtgtacttggagtatccaccaatttacagcatcttatgtgttagtcgcgcagttgtgtccgactcttttgagactttatggactgtagcccaccaggctcctctgtccacggaattctccaggccaagaatactggattggggagccactcccttctctgggggatcttcctgaccagggaatgaacccgtgtctcctgcactgcaagcagattctttactgtctgaaccaccagggaagccccagaagcatcttaagtcattacgaatacttttaggccagtcgatatttttgcccctgccatgtcttaggcaatagctttcctgcaccttaataacagatgaggtgaggcagcaaatataatggctactaaagaggtgggttattttaactacaacaaccctcaaaacatacaacaggattcaaggccagaattattacgtttattttacagggagaggggaaattctgaccaagaagtgtaatgtgctcaagatcacttggcaagtcagtggccataggtagtattagaacacaggtctcctagggatcctagtctactgtatccatgggtaaaactgtaaactgtagaaagaaagaaaatttcttcgaataaacatttatacaaataaatactttgtatgtgtgactaaatgtatccaactgaggtgatactgatggatgaaaataattttaataacctaaaatatttgtaatcaatacacaattttgtttatagaaaatttgtatctctaatatcaaagatgtcataaggacacacctaagttaaatgactatgtcacaaaccatacttatagtaatgctttacaatgctggagatactctattttgttttgtcagacaagtacttcatagaacttgcacacttaccttaaagcaggtaacacaaaacacttagcatttcaaatagccttgcaaagtgccacctccccacagatctaggataaaataatttatgctaggcaataatgaccacagatttcacatatgtctaagtctatatactttctaatgggcagaccagcatgaaagaaattaatggatcattctctttaaatttagaaaccaatttttttaaaactcacataaatcagtatcaaattgtgagctttatgcttacaacacagaaaataattctaaaattaaaatcagtctaaaaattaaaattgctgtttatatatatatctttaatcaaaatgaagcaatggattatctaatacactgccattactagcatcaaaaatgtcaaaaaattgtacaactca

SEQ ID NO: 63715 - DNA, 744 bp, Bovine  19866881028767
  misc_feature (1)..(1): n is a, c, g, or t
ncattgcaagcagattccttaccagctgaggtaccaaggaagcccaataaatatactatcccttctctttaacacacaactaaatttatatttaatatttggaagcattatcctgaagacagtaccttggacagcaaggagatcaaaccagtcaatcctaaaggaaatcaacccgatgctgaagttggaactccaatattttatccacctgatgtgaagagctgactcgttggaaaagactgatgctgggaaagattgaaggcaggaggagaaggggatgacagaggatgggatggttggacggcatcaccgactcaatggacatgagtttgagcaaactccaggagacagtgaagacaggaaagcctggtgtgcttgcagttcatgaggtcacacgagtgagcgatggaacgaaaacaatcctgaatagactacacacttactgtgagaacagcagcaatcttcttggctacagagggggtaatttgaaaggcatgagcaaactgccagccttccaaatcaaagacagccttgattccatttcgctgtgtctctacctcctggacaataagctccgacgtgatgagactcacacgaaatgcatcataagctgtgaaaacttttgggtcccagtgtgctaaaaaaaaaaaaatgtaaaaacttatatctcagtactgtgtgaagaataaaggatcagaaagatttacagaaggaaatggattcttttttagatttcaagatcaa

SEQ ID NO: 63716 - DNA, 1421 bp, Bovine  19866881055657
  misc_feature (1)..(1): n is a, c, g, or t
ntgatattgattctgttgacctagtattcataatgtgtttgatgcctgaatcagagaaaactttttatattatgcagctcaagtcagttcctatatattagattatatcagcttgattaaattttcttctatgtatctcaactggcagtcatttccatgggcaaaatgaagacctttgaattatcttcttatttgattaggacatgctgtatttttttaacctctatctctctcttttctaaatcaagatttagtcacgttaattagaactggtagaccctacagccaaattttaaatcaagccaacggtctcattttttgaaatagccatggacgtttgtatggggaaatcttcctttattaccactcactatggtagaaaggagcagagcaattactattgcagagtaatttaatactgttttattaacacagcctttcatcttggtaaggagttctgggattcatgaggatgtccattttctgtgaaatactatcccatttaaatagattaatccactatctatcgttataaaagcataaaaaaataaagatgaactaaaattcgagtagagaataaaatgtaagaatcaattaacttgcatccttttaaaaaatattatactattatctttaataattagatacatttttcctgtttcttacctgagctattgttcttttttatgccaggtacttgacatgttagactagagaagaattaaatctggaattaaaacttgattaatggtccaaaatactttagagtttaaatcatttggatgaagtaaattgtagaaatggatgtttgtttttatgtagtgaatggctcttttatcagacattatttggtgtttaggttatagtttactttctctgcccagcaggtttcctggagaaacggcattgtaggcattttagagaacttacaatgaaagaacattcttttgcagtgctttctttgtaaaagtagcatacaaacataaacttttctcataatacttccttcttttaattgcaactattacttctcccagggagaagtgaaaaattaaatcacagagaaaccaaagaactgtcttttaagagtagatagtctttaattcaaatgaatattcattttattcttcatatctgagtactcctttattcctccagatcaaaggatttgtgttatgttgttttctgtatgtattttgcctgtgttgccatttgtatggaataaacttgttccatggcattaaagacatttaaaaaaagccacatccatttatctttctgattttcaaataaaacttggctcaggatccatttaactaaccataatgttttcagtgctcagaatcacattcttctcctcagcctctgatttcccacagtagaaggaggtagatctcagctttagtttgggggtgtgtgtg

SEQ ID NO: 63717 - DNA, 1610 bp, Bovine  19866881057554
  misc_feature (1)..(1): n is a, c, g, or t
nactatattatcaggcttttaaaatgaatcagttcattactcatgaaattaatgtatcccctttgtgacatgtacactgggatctatttatgaattgtctattttattccattgatttattattttaagtctattttcatgtcaataccataatgattttattacagtggcttattacagtacatctccccattgccattagatttttaaatagttttcttggttattctggatatttgttcttccataggaaattcaagataatcctaatgaaataaaatttcttttgagatactaattagaattatattgatattcacagtattacttttgggagaactgacatttttattactgtcttcctatgcagtatgttatatctttgcatttgttccagttttgttttctgtcttttagtgatatttgtactgttcatttctgtgctgctcttgtactgttactactttacagtttttgtcacttttgtgaatggaatatttttccatttataagtgcttttttttggccatgctgtgcagcatgtggggtctttattccctaaccagggactgaacccacgcctcctgcaatggccatgcagagtcttaaccactggactgccagggaagtccctgaatgtgctattatttctgcagagaaaagctactgattagaagtatttattttgaacccagcagatacattctttaagtgagtttatagatcatatttaccattcctttaacaactctatgttgaacacttttctaagctctaggataaagcagttgaacacaagaactctgccctagagggctcatattctaatgtgtattacagtaactaaagcagggcatatggtctcagtcattgaaacaaaggagcactatgataggctggaggagcagactcagagtgtttactctcagcgtgacttggtggtgtcttgcaggatatggcaaagtgaccatcaactgagattggagtcttgatcacagtctttttctgaattctctctgccatgtttggagatttccacaatttccccctccaagcacctcttttccccactacatcttatcttttatgcatcatgtgctttcagagtgtcgctgctctgagacaaatcttttaacttaggaagttgggatgcaccaaaaatccttgtgttgccatttcaaacttgagaagaaaggtaagaagaagcagtactgttatttgtctaagcttttctagaaaccaattagctaattactatgtcatctcagttcctccatccatgtatttgcagacttttcatggattttcatcacaaaacagtgtcgagtgctttgttgagatgtaaatagattgttattactagatactttcatgtattcattcagtaatgtcaaaatacatgatgtggtctgatgtagcttaggctcttataaatacgtactgataacaaggctacatatccttctttcccagatagacaaaattaatttccttgttgtatcttcaataacttttgagatatcaagaaacaagccgttttaatgattaacaattgactctatctcttctggagttgactcacatcattttctatagctctgaaataattc

SEQ ID NO: 63718 - DNA, 1090 bp, Bovine  19866881073777
  misc_feature (1)..(1): n is a, c, g, or t
ntcccagatgaggggggtagagagagagcaagaaagagccccgagaatggaagtcaccaccctttaccaaccagcctcagaaatggcatcccgttattcctgccacatcctatctgttaggagcgagcccctgaaatccagcccacactcaggaggagaggatcatgcaggacaggaacacagaaggcggaggtccttgggccacctgtctgcctgccacaccaaaccatccctccctccttgcaaataaatcataatcaggggtgaaactcacctgaaattgtgattctcttttttttttcatgaaatggcctaaaaatgtttaagtgactattttgctttcaaaatatcaggcagcaattgtcaggcagaacccaccactgccaatttttctcactgtactataatttagggtgcactgccacaactgctattttctgtgacattcccaaggatattttaaacaatgataaaaaagacagttatatcaatttcttgagttttattattattattaacaataataacaaccagacgagcaaaaaggagtaatgtgtctctttctccatttatcttattcctgccctctgttacgatctccttggctgccattgttgctttcaaaaagctagttcaattactgaaatactattcattaaattagaaatgatgggtttgccaaagaaattagctatgatttagaaatcaaaagcataggcaaagattctgctcaccatcaacgaatttccagaagtcttaacatcttttcacagccattgtgaaccacagaacaaagttgatgcttttgaaatctaacccagcagttaaagacacaaaagcgacaacatctgtaaatagcttggttttcgcaactatctaataaaaaagctcatgtgcaagtatctttctgccgattgttcaagccccacagtccttatgattttccatagctttcaactgaacagaaagaggaggtctgagcgcactccccgggaatctaccccttgggatgcccaaaaggtcatcatgcagggtcaggaaattgtttgcaaagtgtcatttcaaaaaaaaaagaaaaggaataggaaca

SEQ ID NO: 63719 - DNA, 1187 bp, Bovine  19866881177579
  misc_feature (1)..(1): n is a, c, g, or t
naaattgtcttacagatgcccatatgtgcaaaaaagttgttcttcactatttttattgaagcagttttggtaataggaaaagactggaaacaacgcaagtgcttggaaactggctaaatgaattatggtagagctatgcagtggtcattacagaaaagaatgagggacttcttttctataatgaaggtggcccagtggataagagtccacctgccaatgtaggggacacaggtccaatccctggtctgggaggattccacaggcctcagagcagctaagcccgtgcattgcaattcctgagccggagctctgcaacaagagaagccaccacaatgagaaacccgcacactgccagctaaagagtagtcccgctggccgaaaccagagaaaaccagagtgcagcaataaagacccagcacagcaaaaaaataagtaaataaagtatttaaaagggagagagaaaagaatgaggaactctgtatgctggagtagttctaagacacagccggaggcagagtcacttgtggtggtgtgtgccgtgttctagatcctgtatttgtctcagcctagaagatgcagagaaaccagttacacaggttgtcttggggagacagggctggggggctggggtcatagaccaaagaagaagactttgtagcctctccttgtacaatctgctcaggaaaattcaagttggtaataaataaacaaaatgttttcatcttcagtcagcagtgccatgggatactgggagaagagatcccattcttactttgagtaaaagcctccaagagcaggcggcatctgtgaagccagggcgactcaggtctcacagggggaggagccgaggtgccagggtctacacttcctccgtcccacatgcagagtcccttcctaaggtgccaacctagaagaatccaggttttcttttaccaagaaaggtggcattttccttcacaggtcattggactctgttttcatagtttctttagtttggctgaaactcaggaaagtaaacagcaaaaacaagtgaaccatgaagttaagcctacatcattggggtgtgaactaagatcattaaatctgtcatgtgagatctaaatattaatgtagaaattccatgatgctataaaattgtgccaaaagtagactaacccacaatataacagagtaaacagctgctgctg

SEQ ID NO: 63720 - DNA, 992 bp, Bovine  19866880413321
  misc_feature (1)..(1): n is a, c, g, or t
nccctattgaggatgtaaaaattgatatgacactatcattcacctgtggtttttaagtctcaacgagatccaaaatcatttattataagatgaaggtacttccttaaggatcttttacaaaggaattactccaaactggttataaggatgttaaatatagtatttttacaataataatgataatatttaaagctgtacaagttcaaccacagaaaacataagtgaatcaatactagagatcctataaatcagttattttcattctttataagtattcagagtagttgactacatgaataaaaattccttgtacagaattaaatggaatcagattcttgctcactgataaaagaggaaagaaagaagacaggtagacagacaaacgagaatcaaaccaggagtccacaaattacagcccaagagaaaaaatctgactcttggcttccctttagcatagcccacaaggtgaaagtggctttcacacttttaaatgattgaaaactatcaaaagaaaaaactatttcatgacattaagattatgtgaaactgaaggaaacacaaggaagttgtccataaataaagtgtcattggaacacagccacacccatttgtttacctaaactgtgcttttgtgatgcagcagcagaatggaatacttagaacacaagccatatggcccacaaagcctaaaatattttacgttcttgtcttttgctgagaaagtatgctgactcctgaggtagacagataagtaggtagataacacaagctgtaatcctccaccatctagacttcaaaaagttccactagaaatccaaagcatagtaattaaaatcaccacagtactttgtgatgtgttttatcatcacttaaaaaacaaaacatatttatcatgagccagtattattgctacaataatactatttatatgctttcccttagaaaaatggacaggccagtgtccaaggtgccagggacctggcagtgtccga

SEQ ID NO: 63721 - DNA, 1482 bp, Bovine  19866880493815
  misc_feature (1)..(1): n is a, c, g, or t
ncggaggaagcctggtgggctatagtccatggggtcgcaaagagtcggatacaactgagcgacttcacttttcacttttcattctactaatagcatggggagtcagcggcagagaaagtgatagtaaaataagttaccttcttctgtgtcaccttttgaaaaaatgtgtgcaaacatttattgaggtccagccctatgcaaggcacctggttaagtcctgaggatacagaaatgagtaggaaccaatatacttgccagaagccctctgtctagcacagaggttctcaagtgagatgactttgttccacaggggtcatctagcgatgcctggggacagttttggttgtcacaacatgtaggaagggaaccaccggcatttagtgcatagatggcagagatgttgctaaacatccataatgcacaggctagcaaagaattatccagtccaaaaggccaataaaaaggtgctgaggttgggaaaccctgaccgagccctttcctggagtcttcctgcctctatcaaactcataatgtcctctcacctcaacatttacatttagtaagttataaaaatcaatgagtacaccaataatctccatgaaactacatatttaagttaacggaatggtgccatttccatactcagacttcaaagccaatgactccatatatgatattatcaatgaactctggggactggtaagtgtggggatttcacatgtggaacacacacttcaggctctattcagtataacatcttccactctcttttaaacctttaaactttaggattttgtcaggcaaggaaatgaaaacaaggtatttttaactacctgctcaattgcttggaaaattacctcttaaaacatctgaacacccacttctcattttttccaaagccctagagtagccaagtgatattaatcactggaattccttgatgaggaaatgccatttttcaaagtattttaggacaatttgttttgtttttcaagctctgtattctgggacagatacagctatagatacagatgtccatctgcaacacaaataatcatgaatttgctgcaaacccaacagcagcacctggagaagagaatggcaacccactctaatattcttgcctgaagaatctctggacagaggagcttggcagggtacagtccatggggttgcaaagagttggacacaactgagtgaatgagcatgcatgcatttacagcagtatattctctgaattcaatactcaattttgatagacctatatgagctttcaaagggcaacaaactcactgcagcaatggaaatctaaatatttataagctcttcaactacaaatgcaatatatattaggcaaaataaaaaatcctgatattgtgtagtgctatatacaatgagattgtacaattcctttagtcttccatctgttcaaataaccatagcacagctggaggcaataaaagctactcaattgtcttctca

SEQ ID NO: 63722 - DNA, 2932 bp, Bovine  19866880705409
  misc_feature (1)..(1): n is a, c, g, or t
nctacattttctaagacttccttaaaaatcactgcagatggtgactgcagccatgaaattaaaagacgcttactccttggaaggaaggttatgatcaaccctagatagcatactaaaaagcagagacattactttgccaacaaaggtccgtctagtcaaggctatggtttttcctgtggtcatgtatggatgtgagagttggactgtgaagaaagctgagtgccaaagaattgatgcttttgaactgcagtgttggagaagactcttgagagtccctgggactacaaggagatccaaccagtccattctaaaggagatcagtcctgggtgttctttggaaggaatgatgctaaagctgaaactccagtactttggccacctcatgcgaagagttgactcattggaaaagaccctgatgctgggaaggattggggacaggaagagaaggggacgacagaggatgagatggctggatggcatcatcgactcaatggacatgagtttgagtgaactccgggagttggtgatggacagggaggcctggcatgctgcaattcatgaggtcgcaaagagtcggacaggactgagtgactgaactgaaggaaacctttctttagaatcatgccaaagagtgaaacagtgtagctgttagaacattcaagttcttgttgttagagggtactcaccagaaaatgggcataatatgtataatgttaaatactatgtttccttaactagtttatgggattcccgggtggctcagtggtagagaatccacctgccaatgaaggagacattggattggatccatgggtcaggaaaattccctggagaaggaaatggcaacccacttcagtattcttgcctgggaaattccatggacagaggaacctggctgcctacaatccatgggttgcaaaagagttgcacacaacttattgactaaaaaacagcaacaactcgtgtataaaaatcatgtcagtaacagctgaagactgcaaaagaatcatgccagtttatctgaaattacagtgagaaagaagtaatattcacaattcttaatgtttacttattgagtcacacttttaaacaccttcatagtttaaatatgatgatgaaaatctaagccaaataagccatggttaataaatacttgttttacattgatcttttcatgaatgcagttacaaaacaacgctgaactttttgaagatacatatgcaaaattgggtacatctgcaaaatacacatggacagccttttgtttataggattatgtggacatttatagagtatttttttcctctgggtactttggagctggctcctcagaataccaaagaatgtgtgtgtacatgtgtgcccatgtgtgattgttttgcaacactacaatgatttttagggattagaattatgtagggctacatatgctccaataaataacactcaaaatgttttaccttctgtgattttctatttatttcttaatttttaactgtcatcttttgagaatggcaaaattattacggcaaattctaactccagaggaaattccccagctcagccagttgccagtggagctataatatcagtaatgaagagaaagttttcttagaagttaaaagtctggaagaaaaggttaattatgtagagctgcctgacaagcaaccatctatcataaaaggaaagagctttatataatcaagtgtccgaaagttatcatgaaaaaaaatagacttcaaaccatttcacagagtatctcagagttttctacttcctcttaatcaaaacagattttaaagaaaaactcattaataatttagtcatgagtctttcattttggacattaaagtatctgaagaaacagaaaccaacacacagaacatgcattgataaaatacattgattgtaatttgtaaagataagcatgacaaaattaaacccgtagtaaatgcctcacctattagaaactcagaattttcttgttctatatagcaagatggttagacagcatcaccaactcaatggacatgaatctgagcaaatcccagggatagtgaaggacaggggaatctggtgtgctgcactccatggggtcagaaagagtcggacacgacttagcaactgaacaacacatagcaagataaaaagaaccaagaaaatcccatactgagaagtttagatttagcaatagtacaagaatgaatcacttaactgtgaagttgtagtgattaaaaaaaataaaacaatatttaataaaatttaacatgaattatttctctcttatactatactctgtgatcaaattctcttacaacaaacttcaagggaaaattttatttcattatcttagaatatttttttgaacactacttgaaatagataattagctgggagcctgaaattattttagttaaatcaagattactgtaataagatttagcctgtatttcattaaaaagccaactgatcagatgcatctggggaagccataaccttgatttgtctacaactctatttcatttgccattcattttttatggtaactcattgtgaacaaattgaagaaaaacgtaccccacttggacattatgatatttgtttgtagctttgtcctggttttagtttcctacttaatgactaaatggcaccacagtgggtaatgcactggagtaaaagtggtgaatcattaaagacttcgtaaattttaaaaacaggggcaggccttctgggccccatatgcttctagaaaacccaatgttgtgctgtattaattgaaccgtgaagcttttattagtgctctttaaaaagtgcttgcagtgaagcttttattaatgcttgccctcaaattgtttagtactacttagcatttccataagatttttttatttcaaagaactttttgatcattaattatatctactctacattt

SEQ ID NO: 63723 - DNA, 2044 bp, Bovine  19866880715280
  misc_feature (1)..(1): n is a, c, g, or t
nttgcatacaaatggtgtttttggtctggctggcattgcagatcttttccttgaaatgaggtgacataatttgattttttacaatctggggggaaaagaagtatttgttcatcttgagacgttagagaaaaaaagattgtcactgaataaaatgcatgacttgacacaattcagaaaatgggttggtgccagctagagaaagctaggaggaattctacctggttgaaaagtacaactggtctggtagtaaaggaaaatctcttcaggtggctcagtgggaaagaatttgcctgccaatgcaggagacataagagatgcaggttcaatccctgggtcgggaatatcccctggaggaggaaatggcaacccaatccagtattcttgcttgggaaatcccatggacagggagtctgggggtctagtccatggggtcacaagcagtccaacacaactgagcgattgaacatgcacactaaggaaaatctctaggatcagtcatgtggggctttgtaatggacagggaggcttcacagaggaaaggattccagttcaccttcaccttagcaaacactttcccttctgaattccagtgaactacatgttttggtcatagatgttaaaatttgaaggcttctccagagactctcttgacaagtaagatattctttagtatgtaaacttttacagataaaatacctcaggtcctgagagatattaagcaactttcccaggaactcacatatcaccaccctaatatttgattcttttcttcctcctggtgctgtctgtctctagatgctatgctgacttttccagggaatatcaagaataggatctgattttaatagatagaaggcatccttctataaatatcagatttactttgacttatctataccttagtgaagaaacacaatgaaatcaaggatgttttaaaagtaagttgagtaaaccactataaaaatatattgagtaatatataaagtattttctgtgctaagtagaagaaatcagattataaagccatacattaattatatgtgaaggttttattttttttccaaaataaaactaacataccataagaacaaattgattctttttttagtttgaaaataccttaagtaataaatgcaggtatagatcttaataagtacatattttcaagttcttgaactgcatacacctcaaaactattccaagtaaacgtctgttgttgttgtttagtcactaagtcatgtctgactctttgtgtaggctatattaaagctaggcaaagctttttcttatctatacttgccaaaaaaactcctgaatatttaggaaaacaagcataatttcatatatttaagtgacaaaaaattacttttaggagaaacacagtcattttactaatcgttacaaggttaaaagtttagttgatcagttgtgtccgactattgtgaccccatggactgtagcccaccaggctgctctgtccatgggattctccacgcaaggatactggagtgggttgccatttctttctccaatggttacaaaacagcagttaaaaactctgaaatcatggattctagttaatataataaagaactgcttgcaaaattcttttcatgccatggtgagaaaaatactgtcaagtaaagaattcagcacagttaaataatttaatttggtcttttagagcaagttaagaagttcaaacatttttgtcctttagttaaaaacacttttccctgcaatatagttttttaaaagtgaactgtttattgcatatgcatccaaaggccatatcatactcattttgtataaaattgcttaaagaaatattctctcacactaaatgttcagttgaaactttctagattctcaacataagtatcagaataatttaaggtcacatcatgagctattatctaagtgtatagatataatgtctatatactcaaatggagcaagttaatttaagaatggtagctgaaattgtgttttatgatagaacatgaaattatctttaaatttacagggaatataattataggaa

SEQ ID NO: 63724 - DNA, 1111 bp, Bovine  19866880888366
  misc_feature (1)..(1): n is a, c, g, or t
naaaagaggagctgtactgtgaatggtacgaactcattttttcaggacagtaataatggcactggttctcctgtccaaccctgaaagatgtgtcataacaggaccgtaactcttttaagtatcccttattgtcaatctcattgactaatcaccagcagactcttgaatttggcaaacttggaatttactctaaaaaatgccactaactcatggaaattaagggaactgtcattctttctgctgactcacttttattcccttgttctctggtgcatgaggtagaaaggtgctctattttggtagatacgattttgtccctcagtgaaatcctgagtggcagctaagtgtgacatttgctcttcttttcactttgtttcttctttgaaccatctcactgtcaaaatggtgttatagaaggaggattggactagaggtaaaccctgactgctgctcctgctccacctgtgactagcagtgtgatctcaagcagtcctatagcatctttagacgaacttaccaattgtccaattcctggcatatttatccaagtcatggttgggaggaggagagtaaatagttaattagcattgactataaaaatatttatcttcagctgaaccatatgcaatggccttttttgtagatcaggcagtttcatatggtttaaactatatttgacccttgaacaattcagggttgaggggcacagttgaaaatccacctgcaaattcacagtaggccccttatatctacagttccacatcctaggattcaaccaggttaggatcgtatggtactataggatatatttactggaaaaaatccacatataagtggccctgtgcagttcagacccatgttgttcaagagtcaactgtaaaagattctactatccacacttcaaggcctagggatatatacacaagtcagatctggtttgcatctacattgtgaacatgatgaaaattgttattcatatctacaactatttttttttctgtttcttccatttcgtgttattctctttcctcccaggttaaattcaggccttcagaaccatcttgatctcctcattttatctatcccttatccatccattcgtttcattcat

SEQ ID NO: 63725 - DNA, 725 bp, Bovine  19866881084357
  misc_feature (1)..(1): n is a, c, g, or t
ncagacatgaagcccccagtgaagatgccatctgggagtgaatacattaggccaataatagtgtattgtgaattactgtgaataatacagacttgacacatcagcattagtaactagcaggcctctgaggaaagggaatgtagaactgacaacatttaaattggtctaagagaggaaagagcagagtgaaattccttaggcctaggccctaacaggtaggaaagaaggtttatgaaaagagaaaagccaaaaggtagaaaaatgtctttaaataattttactcattatctagatcaacctcttattttgaagaggtaaaaatttaggaccaaagaaacacaaaaaggggaatgccagcctcaaaacaacattgatgatgtcacaattttacccagcactgatgccacttctacttcttccaataaatcacactcctttttaaccagggtcaaaaacttgtttgatgtaatataaaaattccaaatcaaacgatgtcatatttattatagtcacaagaatccaacttagctttgaatgctgatctgctacaatagtgcatattgcaaggacagaaacagaaagcatatggaatagaaataagttgataaaggattttaaaacaaaagtaagcaaaaagcaaaagaaaaagttcattttttttttttaaatcccaccattacctatgggcattccccaagcatagaatctcttttgtccctactttt

SEQ ID NO: 63726 - DNA, 1772 bp, Bovine  19866881100222
  misc_feature (1)..(1): n is a, c, g, or t
ncacatatagcacaccagggatttcttagggtgttgtttaaggactcccctaaaaatacagattaagatacttggaacttacctagaaatttcaatatcagaatctgtgtaacaagagtccataaacggcattttaaacaaattcccacaatgatgcttaagtgagctaaagggtgagaacaactggaggaatgacatatgtataaacaattaagaaacaacaaaacagagagaataacgtggtctaaactggctttggagtctgacagaccataatgaaaattccaccttcccaatttcttgctatatttttatgggtaaattactctaccactcttactttcctcaccaagaagatggtggctctaataactacttgtaggatcactagggacaaatgacaatacatttaaaatacttagcacaatgctcaataaatgggaaatatcattatgaaagtcagggcctctgtgttacaaactgcccctagaatcgtgaaacatcacagccctaataagtataattttttaaagggaacaggacagcatatgcactacaagaattcaggaaagggagttttcactgtaatcagaggtagaaggaaaggtaccctgaaacagctggtatgcagctttaggatgttggattttaaatcaaacatgcatggttggcaaaaatgtccttctttcccaagggtcctcaagccttaactcaatgaactggaaagttttaagaaacaattttaaagttacctcgctgtgtctttcaactatcctgtgatggaaacaatccacatttgaattcccgtatcataaaatatattcagtgttaaaattatcctcaaaattatttcaagttctatactagtaacaggatgttagtcgtgtgttttatgtagcaccttgtattcctgacaagacagtaggactttgtacagactgctgtgttgttgatatacaaaatgacagtgctggccgcctcctcagggagggagaccctttgggtttctatactcttattactgatgggttgtagctattttatcattgcttggaagaacctatgaacgatgtccactgaggttcaggaaggtcaagaagatgaagactaacctgctccagggagcgaactggctcatgataaaatcaagcctcttgatcccattagtaaaacacactaatcaattaagctaacacactcagagccaaacctattaaaccttataattcctgggaagaataaagagcaattactccttcccttcaaaaaaaaaaacaaagagaattacaaaacctgcaaaaaataagataacagttaccaaatatataaatacagtctcagaactcaaaacaaacacagcactcaatccacaagacacttattccctctgagtgagaaggccttctctgaaactgagtatctgaataaaaacaaaggagctaaaacaaaccattttatcacaggcaacttctattaatgtcacagaggggaagaaatacaatcttttctttcatattctacctctggaggaaaaaataagcatatgtacatacgtatatatctgcacatattaaactgagacagatcaacacatataaatagctcaatgcaacatctgtagtagtctttaaaactgtattaaagtccttgctgtttatcaggctggtaaatcatatcagctcctagatatttaaattgccagttgctgggcaaccagagctctgtcaactgtcactccttcttaagttcctctgcaacactcctttaagaaa

SEQ ID NO: 63727 - DNA, 2648 bp, Bovine  19866881126666
  misc_feature (1)..(1): n is a, c, g, or t
nttgatggcatgaagatggtatgtgatgccatagaaatagatatgatcacctaagatggtaagaagtgagaaaagctgagggctcagaacttaaccatgggaaactccaaaatttaaaagacagaggaaaaatagacagtaaaggagatgaatacatagtagttagacaaaacagaaaaccagaggcatagaatattcaggaggaatgaattgttacccatatgagtgaaaattgttcagttgtgttcgaatctttgcgaccccatgggactgtagccttccaggctcctctgtccgtggaattctccaggcaagaatactaaagtagatagccattcccttctctctgggttggggatcttcccaacccagggattgaacccaggtcttgcccattgcaggcagattctttactatccaagacaccagggaagcccccatatccagtgctaattaaaagctaataaattatcaaaaaatatcatggaatttagtaatgtggagctgattgatatacaatacattgaatatttaatttctttaagatgtaattgcattttgacatgttggctaatcaattttactattgactaattcaataagtacataagatttaagagtcatgttattaaaagtcatgttattctcctaagtggcagtaaataaatttattcttaattatatttaactatttatgccagtctgaatttatctcccctatagtgtaaattgcttgaagtctgcacttgattcatatttgtattttcagtgtcaaggcggctaggtattgttgctaagggcatctctcatgggtgtcattcacagaggtggttctcaactatggacaattttatactgagggaatatctggcaatgtctgagacatttttgaatgttacatttggggcaaaatatgctgctagcttctggtgggaagaggccaaggatgctgctaaatatcctccaacctacagggcgcctcacaaaacaaagaattatttggccaaaaatgtcaatagtgtagaggctgagaaacctgacatatcgactatgatgtaatagtcaatgcccaccctgaggggttggcaatcatagtttttaaggtttttttttgcaaacaagtggggatctcgtactgtgtttttcatggtataccaataagttggtatagtaagtgatctttgagtttcatactgatcctgagacttcatagaaagaaatgaatcaataaaagtaaagcacatttgtatgaagtgcctctgcagaattaatttctaacagaatttatctatatggttagaagtagaagacagtgctccacccaatggatgttaagactttttacatcagagtcggaacctttaagtagaagttagttcctatgtgaaagtatatattacggaagttttaatgttaaaaagtaatcttgaaagttattagatatattttttaaaaaacctaaaaggtcccatctctttctttaaaatgaaacattttggctttcagtatattatagttcatatatctaaaattgtgttgaagtatgtataaatataataaactactaggtacacataaccaatttagaaaattgaatatgaccattcatatcaatgaatcctcctctgtgactccccaccccctttacccacctgaaaataaacacaattatgaagttttgtttattgtttctctaatttgaattaaagtttgatatatatatgcacctaaaaatatatgaaattagagttttttaaatgcttgtgtctataaaattaaaccattatcttacagcagacacaaaaatcaactcaaaatggattaaagacttaaagcataatacctaaagccacaaagcccctaggaaataatatagagagaaagctttatattattagcctttagcaatggtttcttggatatgacaccagaagcacaggcaacaaaagcaaaaatagacaagtggatctacatcaaactgaacagcttctgcacagcaaagaaaaccgccaacagagtaaaaagacaacttatggaatgggagaaaatatttgcaagctctgataaggagttaatagtcaacaaatataaggacctcctacaactcaatagcaaaaaaccaagtgatctgattttaaaggacttagatatttctccaaagaagaaatacaaaggctagtgggtatatggaaagatgctcactgttgctaattaccaagaaaacacaaatcaaaacaatgatacatcacctcacaactgttagatagacgttaaaaatgaaacaaaataacaagggttgatggtgttgtggagagattggaatccttatgcactattggtgggaatgtaaaatggttcagttcagttcagtagctcagtcgtgtccgactctttgtgaccccatgaatcgcagcacgccaggcctccctgtccatcaccaactccaggacttcacccaaattcatgtccatcgagtcggtgatgccatccagccatctcatcctctgtcgtccccttctccaactgcccccaatccctcccagcatcagagtcttttccaatgagtcaactcttcgcacaaggtggccaaagtactggagtttcagctttagcatcattccttccagtgaacacccagaactgatctc

SEQ ID NO: 63728 - DNA, 906 bp, Bovine  19866881617408
  misc_feature (1)..(1): n is a, c, g, or t
natataaaagtattggatttgatctgtttttccaccagttttaaatcccagtgattcagcaatattaactgaaagcacactcaccagagcatgaaaaaaaggctctgataaagtgctatagcaacaaatgttcctaaaagttctttaggttctgtttgcttacagaacaataaatgttccctgtttggaaataatccccaaatgttccctcttgttttaactgcctgaattcttaacactacgcagtacacactacttgtaatctatgactgaatggagccctttcctttctcagggagaatggaaggatgttattttcgggaacagtgaggctacctttaccatttttttctaactggcaaaatactgcaataaagtattgctcaactcagtctgaaacaattttcccatctgtcaaaatattttaaatagtatcaagctggtattactttgtcaaaacatttcatcagaaacagtatctaaatttaaacaagcagttcctcgaactatataagtaaggtgaataaactgtcaccgacacaatatatttttttggaaaatctgcaaagtctcattagaaaaaccttgaaggaaatgggtgtttaaaccgaggataaatgtccagtgggtagaggaaaattaatactgcattaagggctgaacatctcattgtcctagaaatgacacacttccattctccccaaactgttcgggtaaacagtatgaataaaaggaaaataatggctagcaatctttcatatcgacaatatatgtaatatattctggctttatacactctctacttctttctgtgataatatagcacaagaaaaagattaagagaacatctctccaggtcagacctaacatgctttctccacaaagcagtatatcttcaatcatcta

SEQ ID NO: 63729 - DNA, 703 bp, Bovine  19866880449309
  misc_feature (1)..(1): n is a, c, g, or t
ncctgtgggcatacaccgggttgcccatacacctgtgggcatacccctactggctaggggtcctgaggaaggggccccgggggccagggttccaggcagctcctctccaggtctgcatgaagccttggttctttggggacctgctctgtgtgtgagcaatcgtactctttagatctctgagtgtggctaaagccatgtggggctggcaggcaaatgaggcagtggaggataataaagggaggaccgctctgccctgcaccgtccccttggccccagccctctcccctccccttaggaggggcctcaggccccaggagcagcttctttacactgtgactgtgtgcatgaggggtgttaatgattcatacaaatctgcaagttaaatgctctgtcaaaaatagaaatgcaattgtctacaataaaattaaaaacaccaagttcctaaatccaaaggctgctattgacagagtttcctgtctgaaggaacaaacctctcactgtgttgggaggggaaaaaaattatctgtgttggtttcctccccgccgccctcttcaatcagcagcctccatcagtctccagtctctctagagaggactttacaggtacaggtctgcctgtggcctgttctccccctaccgcatcctgatctgacctcactgcctgctgctgggtctctggggacccagcctgtgagtgatggga

SEQ ID NO: 63730 - DNA, 3343 bp, Bovine  19866880488899
  misc_feature (1)..(1): n is a, c, g, or t
ncggcaaccgaggctctctctcctctcagaaaagactccaagggcttttcttgtaacaggagagagggttgcagaagagagctgagggcccagggtgggcatttctgggggaggcagccatggtacccacagaggatgccccgccttctgtgggtctcagccgcaccaaaccagaggcctaagctagagtcatccctgccttcggaactggtgagtgttgacttctggactggctgttattctctggactggtggcaaaccgagctgggatccatttgttttgaggaagatgagaatttattcccctttatcttcctcatcacagaaagagtatttgaggttcaaactctgggttttaaactgtgttgttcctgggacccctgagccagggaaagggtcagggtggggcgagaggcgacaaagaaaaagggatggtgtgttcatagttgcaatttaccaatggcaattagcttcctatgatgactaacctttcaaccttctgccagcctgcactgggggaacaattgacatttagaatctgcaagccaagtgccgtggtgcgggaggtgatgttttttaatggggactcagggcccatggatgtgctctctggccctgtgctatgtgcatactttacggggtggaggtcgagctgcattttaacaggtttgctggcttcctgggaaagtgagtgcagccgtgactgtggggattgtcacccgtgtggttcccagatgcagttggttttgcatccttacaccttccctctgctcttgcggagtaggcagaaaggatggcaccggcttgggtgggccagaggcttcagtctctcaccatccaaggaactgaaagatcaaggtcatttttcctgcctgcctctggctaagaacccaccctcttcccagggtagactgtgctttccagtgattactgtgttcagcctcctgcccctagatggtgattggctttctctagcctagccagggacctctctgggtctttaattcatccacccatgcaaccatgtgctcattcaagccactaacatttaccaggggcttattatgtgccggccactgttctaggcaatgagtatgcagcagaaaaatagacaggtccccccatcctcagagagcctacacgctagtggaggagacaaaggagaggtcaaacaaataagtgcaacatgtggaatatcaattgtgagatgtgctttgcaaaacaacacagcagggaaggaggagaggagtattgtggtggggagcttacttttaacacagtggtcaggaaaagcctcccagagatatttcagcaaagacttgaagtaatgaggggggagccacctaataagaacagccagtgcaaaggtcctgaggttcccaagagagacctgcaacgtgcaggggggtcaggccggtgatgagcaggcaaggaggggagaggcaggcagggatcatgaagggccacagagacctccagcagggctttggctcttcctctgagttccttggggagccattcatgccaggaggatggcatgagccgactggtgctttaaaaggtccactctggcagcagatggagagtagattttagggggtcagagagacagggtggagcactgctaggaggctgtggcagcaatccaggtgagaggtccttatgtctcctcagagaaagtgagcccacagactccctcaactcacggtcatccagacgttctccactgtgcgctcagctgggatttccagtagacatgtgtggatgtgggagctggaccagaaagaaggctgagtgcccaaaaattgatgctttcaaattgtggtgctggagaagactcttgagagtcccttggacagcaaggagatccagccaatcaatcccaaaggaaattaagcctgaatactaattggaaggactgatactgaagctgaagctccaatcctgtggccacctgatgagaacagctgattcactggaaaagaccctgatgctgggagagattgacagcaaaaggagaagtgggcagcagaggatgagatggttcgataacatcgccaactcaatgcacatgaacttgggcaaactctgggagatagtgagggacagggaggcctggtatgctgacttccatggggtcacgaagagtttggatgtgacttagcaactgaatgaaaacaaatgaggctggtgtcctgggtcttaaagcttatctttgggcaagaagatacctggcttaagagatacttggccccacccagagcatttgctgggcactctccccagaggaatcactgagggtctccagttccaaggagcagagctcaggcatctttcccagacaggcatgagccctaagggacaatatctatggcaaacctatgcttccctgcactcacggagagccttcagctgcaccatctcatgcacatctcatgatcaccctgcagatgattattattgtttcattattattgttcaccctttgcagatgaagataggtcttcaaaggtctcagctagaggattctgagtttctcagcagaaagtgaggaccaggaggagaggctgggagatgaggctagggtggggagtgggccagaccctggagggtcctgagtctcattgtcttccccatcctgaagaagccccttctccctaaaggggctggggtggaaatcaaaaagataggcaggtctccttctggccatggaaccccagactttcgggaggtccatgaccccttatcccacagaggagcctgggtttaactctatccaggaggaaaatggcagagttataacatgggttggcttctccatagccagctctttctccaagggttcttcatgcctggcccagcaagtgagagtctggcctgccctccgcagggttgctgggtcccagagatgttgaatgaaggttatcagggcagtcactctgcctctagggactggagctcctgggccatggctctgtggctctgctctcgtgggcagggcttagaactcaggcagagggaggaagctacagggatgggatcatttgtcattgcgggcacctgcctgctgagtcactcactgggactccagggacagcaagggtgctgtgcagtctgctggaacttcctcggaaacttgagcccacatttataatagatttataagaactgtgtggacatgtttgcttttttttctcgcccctcataagtgatgccattatggtagccataattcttatttactccatcagcaggctgctggtgctggcacaaaaatagatttggagaattatctcatacatgcatcataaggaagcaacaaaggcacccaggtgagatttat

SEQ ID NO: 63731 - DNA, 1948 bp, Bovine  19866880497443
  misc_feature (1)..(1): n is a, c, g, or t
ntatggatgtgagtccaacactcatgttggactacaaagaaagctgaatgctgaaaaattgatgcttttgaactgtggtgttggagaagactcttgagagtcccttggactgcaaggagatccaaccagcccatcctaaaggaaatcagtcctgggtgttcattggaaggactgatgctgaagctgaaactccaatactttggccacctgatgcaaagaactgacttatttgaaaagaccctgatgctgggaaagattgaaggtgggaggagaaagggacaacagaggatgaggtggttggatggcatcgctgactcaatggacatgagtttgagcaagctctgggagttggtgatggacagggaagcctggtgtgcttgcagtccatgggttcacaaagagttggacatgactgagcaactgaactgaattgaacaagtcactgtgttgatatcaacagcaagtgtgtaatctagagacctggggtatggatgggaggcctgatttcttaaggcccaggaagatgacaggagccaagacagaaccaagatgaaagggtgagatcaagagcagacaggcctgattcctctgggctacactggatatcagacttcactgcctgaagatatgggccccatgatagaggacagagacatgagacaaaagctgtccctgccctccagtctcagctgggcacactttccactccacgtgagtgggaatggacatgaagacaaaggacttgatttccagccccagctgtgcagtgactcagtgggccatcttgggcaagaccctgcctctccatggggctcggtttcttcatttacaaattgacagggcaggagaggaggatttgcaaggttctttctacaaaagggacagtgagatggacattaatatctacctactgatacagcagcagaattctacatggattctaaagaaagcccagacctgctggctggcagatgccacgttgactctttcttacagatccctctgtgccagggcagcccataatcagtcaccttccttgaggaagctaacaatagttaggatgccacacccccggcccagaacccctctggagcaggaactaggatgccaccctgcccagaactcctcggggaagctctgttgcctggtggccgtggcagctgagccttgcaggggggagggaggaaagataattgagcagcaggtgcttctgggcctggtttagggcacaacagagatgacagcgcatctgccctacgtgtgttttcttatttgctcccagcaggaaatcaatgatgtcagaaaccgagggataactctgcagccccaatcaatagaccctgattaattcagtcatggccgttgggtaaatttgctgcatcataattagaattattaattaaaaataggaaatcaattgacacaaattaagcaaagtaagaatcagcttggcttctttgacattgtttgggcaggagttgaggacactgcacgctcagctctaatttgggggcccacatcctatgtgacccccgccaggacaaatccagcctccaggccccacagctcacaaggaagcagagtgagcctccaaactccagagctggaggtaccccagaagcatcttattcaataatctcattattaacattgaaaaaaaaaagaatttggggagaaaaaagtatttctgctcattacttttctttctccattcatatgcatatatcattttatcataaaaatgtattcatatggtatgtggtcacatgctctttttcctctcaacagcatggcacaatcacttattcatttgccacataattatcatttgaatggctgcataatattccatagatgtaccataatttgcctaaccagttctctattgttggccattgagttgtttaataataatagcagctacattcatgggcgggggggggggggt

SEQ ID NO: 63732 - DNA, 1031 bp, Bovine  19866880787976
  misc_feature (1)..(1): n is a, c, g, or t
nacactgatgccctcctggtacttccgtaactgtgtgtctcttttgtcctgaattcttctaggatgagctgtccctttcccttctctggacctctccctcccgctaacagagattttcagttttaattggatattcttccctgactccacggccccagttcatcctctgctgagccagttgaatttctttctctgttcctggggacatttttcatctgtcctttctccaaccaatgttatctcagtgctaagcgggatcataattctgccccgtgtcatgggaattctcggcaatctattgcttctgacagcgacagagtctttcaggctcagatacctgagcacatgctcacagatttaggcggggttttttatgtccccacactacacacctgtgatacacgtgttacatagcgccatacgcaaaattgcagccatttacatgccctggaggagggcatggcgatccactccagtattcttgcctggtgattcccatcgacagaggagcctggcaggctacagtccacagtgtctcaaagagttggacacgactgaagtgacttagtatgcagcacgcatatgacatgtccaaaagatgtaaccttgccacatcacacacacagcacatatataatccaaaacagcctggaacgctcaccccttatggactcataccatgccatcaatacacatgatacacgtcccacacatactgcatgcaagcctcagaccacacatgcattacacacaccactcacacgtcacacacacatgcacgcatgcatgtacatccctcaggaaggctttggggtttctgttttgtcaggatcctgctcagggaaagatgcttcattcttgccgcagaggccacgtcccccaccaagacgcacaagggcttcagcaaggagtgttcattactgctaacgagcattacatgcctaattaattcccaggcttggtttgaggatctgacctggggcctatttccattcagggaaaaataaaggagagttaagagggcttctgtg

SEQ ID NO: 63733 - DNA, 912 bp, Bovine  19866880799072
  misc_feature (1)..(1): n is a, c, g, or t
ntgggactggctttgcatgctgctgcctctcacacctctgcttctctatgcagctgcgaggagctttgcccgcctgggagccatggggctcactgtgagctgcgctgcccctgccagaacgggggtacctgccaccacatcactggcgagtgtgcctgccctccaggctggacggtaggtggacctgcagaatcggggtggggctctgtaagaggtctgagcatccctcgttcacatgcaccctggagagctaaattcctctcccatcctgaatagcctccatcctctttatggtcatggggatcattagacactgccggggggccatggacacagctttgactgccggggctcatatctaaatgctgtgtgatctgaagcaagttccctaacctttctaaacctgtggtcccttgtgtgcgaaggagttgaattcttctgataagttgtctctgtcttttagcatactcatttgagctgccatggctctgagatgtggtgaaaaggccctggtgtaaggatggaggtggtgcaggggaagggagagagcaggcatggcccccctgcctttatagaacttcagattcccagcctccaacccctatactcacagatgcacacagatattctgattctgtgggccccgggatctgtatcttaacgtgggctccaggtgattctgaggtagcctccaccagtctaggtctcttgtctggggaaagagggatgggatttatcaaatcacaggcctgaatccagacttcacatagtgttagccctgaaaaaaaaagccctcgatcattctagtctctgcttccctaaatcagggataaaatcaggggcttccctggtggaccagtggttaaaactccacacttccacttcagggagggagggtctgatccctggtcg

SEQ ID NO: 63734 - DNA, 3383 bp, Bovine  19866880802604
  misc_feature (1)..(1): n is a, c, g, or t
nttgggccctgcagcatgtggaatcttcctggaccgggattgaacccatatcccctgcactggcaggcggattcgtagccactggaccatgggggacgtctgtaatgtggaccagtctttactgaatgttacaatattgcttccattttatgttttggttttttggccacaagacacgtgggatcttagttctcagaccagggattgaacctgcgccccctgcactggaaggccaagtcttaaccactggaccatcagagaagtccccggttgtgcagtttaaatgagctgatgtgcatagagtatgtagcaaagtgtctgacgcagagcaagagcttaatcagtaatagtaccgagttgtttttattagtagtctgttattattatttctactgctgctgctgctactctgccactctggtctttctgttttggagtttcagctcctcagcatggctctgaacatcctctgcgatacggtatgaccttgcatattaccttccccagcatgactctctccctcgcaggaagtagactggtctcctacctttgggctgttgctcacgccctgcctgcaagcccttctccccactttgtctggtcaagccttattcctccttcaaagccaatgctctcatccaactttcaccatgaaccacctgctccaatcactcacatcagggcccctccacatgcatttctgtggtgtttattattattatgaaatattgtaaacatacaaaaagtaaggagacaaacactcatgtacccaccacttagctcaaaaggaaaaaaaaaaaaaaatcatagaaacaacagaagtctcctggtttactccctgattgcacttctcttgttcttcccagaggtaactggcctcctgcatatgatgtttatcactgccaagagggtcttgagtttttaccacacctagacccctaatcggtgttagctgtagcgctgcgtgttttgaaggttgagatatatgtacggaagctgtagcaggcgctgtgtactcgatgccatcgccctcagcccatctgctctcagcactgctgtgggaccgctcccggcgctccgccagcctcccacttcagcccgtggcatctctgcttggggctttctcccgagtcccagaaggcagctcagagtgtgcaggcacagcaggaggtgccaggagctagcatccctggggctacctgcccagttccatcagagaccggctcccccgtgcgtgcttccgggcttccccagagggtctgcagctgccccgcagtgacctgctcataatccctctgggctggttttcccctcccctatcccctcctcctgctcctcctgggagagctcccaaagtaaatcccagcacacaggcttcactctgggaaagccaagctaaggcagtacggcttctgctctcaacacggctttggggaaacactcatgttgtgacatatggctctatttcatccatcttcactgccacagagtactctatggaatgagcaggtctgaatacatacccctctccgggtgatggatgcttacgtggcctctggtgtctcgttatgaccaacagcactgcagccatccttcccgccgtttcctgaccaccctggtgctttccatcaggctctctgaccccaggtcccattgcgcttcccattcccattgaactcttagaagtccacgtctccctacctaaaggaaagccctaaaaggcagaggagggaatggtgggagggaaacggattcactcaaggtggagtgggcggacttcagtaccaactggatccagcttggttaccaccatctagtttcaaatcatcactcattcatccacatgtgccaggcacattgaatgggttaacaagctttcatcaatttccccttcatcttcctctctaattccttcctgcatttcatccttctccctctttcttgcctccccaggagtcaaggggacttcctgcagaagtacagaagccaaggctacctggaccccctccctgagcacctccagcaataacggaagctggtgttaaaacaacacgctgtctgttcacctgtgtgcagaaagcctgcaaacagcagttccaagttcttgctactcctcaggcctaggtcacactaggcaggtgacggagcgatagtcccaggggcgtcaagccctccgatcaaaacccacatgccctaggaaggcttccttgactctgccaggcaccaaatcctatagcgtttagtgttactatctcatgcctgctgtgtcagtggctcagtaagcctttattaagcatctactatagtcaggggatgaatgaagcgccatctgtcagttttcacatctgggctttgctgctttctttgtggctgccttggggcaggtggtgtaacctctccatgcctccttttcctcaaggataagaacggtccagatctcatagagttgttgcgaagtcaaagtaagttctcacgtgtaaggaccacaaacagtgcctggcatatagcgctccttgaaggatagctatgatagcctgaaaattctccaccctgtgactgactggggagggggaggggagggcctcaaactcaggaaagagctcccccaccagaacagtgggtaaatgccccagttccctccgggtctctcccaccatcctgggagctctctgaagacagggccctaattcccttatgagactagattttctcaaaggtggagaagaagcaaacttatctcacttagctgatcaaggtccccagggtagaaacaaagtcctcaccagcctgactgctgccttcagtgtgtgactgaggggcccctccccgcgttcaggccttcctggaaggggtgggcatcagaggcctggggggatgtcctcaacctgacatcctcgtgaccacaccaaacctggagttttgagcaatttgcaggaaaggtaaaaacaactggttgcaccactcaaaattttctttttattatcagttaatggcagcacttaccagagcaattttatatgtaataaaacttttttattgtctcagtcttggcttagagaggcagaaaaggagacaagcccagaaccagggaaagaaaagactggagtaaacaccacaattaaaactggcatcttcctaatagggacaaggatgatagattgaggcatgcacctggtttttcttcaaagacggggtaaaaggaagaggtagaaagttaatactctgggatggaggagagaaccagattcaggggaaagctggtctcttctggttttgctgtttggccatgggggtgtcactttctcgcgtctgagcctcagttttctcctctgtaaaatggggagatgtttaagggactgactcccctacccccacaagacctt

SEQ ID NO: 63735 - DNA, 1475 bp, Bovine  19866880824757
  misc_feature (1)..(1): n is a, c, g, or t
ntgcagtggtagccagaccaccctggctggcaggtgcaagctccagtcacggggtggcagctgaatagatgagagaaggatgagaggacagtctggtcaggaatgcggccatgtcccaccctctgcccaccccaggcttggtctgcccatggtgcaggatcgaagagcctctgatgataaactgcttaatgttttcattttattttttatcatgtatttggctcactttgtcttagttgcagtaatgtgggatctagatccctgaccaaggatcaaacccgggccccctgcgttgggagtgtggtgtcttagccacttaaccaccagggaagtccctttttctttaaaaaaagttttttagcttaatgttttgtttatttgtcagaacatggcaaggttacatggtcttatgagcccaagaaactgaggctcataattgttagaaaatttgcctaaagttacattgcaaggaattgcaaaatcaggattagatgtaggtctcctgactcccaaacagtgctctttataatacaaatacagagaccaaagcaggaggcagcctttccaggtccttcccttgtgtactatgaggtttggagcttcacccactctgcacccaaaggagatgcccagtgtgtgggcaggtactagagggctgcactgagatgcagtggctctgtataccgtaggtacttaatgagcgtttgctgagttaaagtggaacctctgggcagatgtagcctcccctctctggcaaagtctatattggagaggacaccctccattcatgcattgctagggctctttaagactgagtaaggtcatctccatccctggtctggctagaacccttggctggaggcaagggctgcctggcatgacctctagagaggtgggcaacctgtggctggcagagtctgatccaatagccaatatgcattcatgttagaggagatgctgagtgtggtgaccaccttcttcttagagcttctgtggggagtgcaattgactgatggcctcacctactgtgtctgaaatccagataatctacctaaagtcacattgcaaggaattgcaaaatcaggattggacacaggtctcctgactctcaaacaagtgctctttacgatacaaatccacagagaccaaagcaggaggctttgttttctccgtggtcacacttcccctgggctcctctcagctagagcacagcaggaatatattaaggtcgacgcattcctgggaagtctgggactcctctgatgggcaattcggctgaaagactccccatcttgtgaaactttcttcgaactgtgcttcactttaagactttgcatctagtcttcctcctttgtttccttcacacaggtcagatctgccttgcagctgatgcttttctagcctccccagccccttccctcttttccctcacagctgtgttcctagtaagacctcttgcattttggcatctgctt

SEQ ID NO: 63736 - DNA, 1195 bp, Bovine  19866880886165
  misc_feature (1)..(1): n is a, c, g, or t
nctggggcgagctgaggagagttttctttggtcaagggttgggaggtctttgtttctctaagaaagatgctcagggctttccttgcaagctgtcttggtggggctcttgcacaagccaggggggcaacaaggcaaggctgctgaggaccccacactgtgtcttttggggagctgagtggaagcttcgcttgcaaagaccacaaaacttttaccattactgggctgatgaaggtgatagacagactgggaaactgagacagagagggggaaattatactcatcaggacactggctcaggcacaggtagttctaaggccaggatccaggggtcccagacccaccaaaacctgcagctcaactgccttaggagtaggagtcctagagtcattactctgcttttcttagctcccaagagaaggctctagaatgggaccaaggctcatgagaagagaggagtgacctgtgtgcacacagaggaagacagctgttctctgtgtccctgagaacaagccaagtgcagcgagagagaggttgagtgagatcggaggttctccaccttgggcaatcctacctctccctacccatccaggttgtcagaactcggggccggggtcgtgcttctggcatctagtggacagagaccagggatgctgctaaacatcctgcaatgcacgggacagccgtccatggcaaagaattatccagccccaaacatccacagtggcaaggctgagaaatttcgagttagaccaaataaaaacttggtgggtgctgggggctcagtcactggggcagtgagccaggaaaaagtggtgaaacattagagcttgggcagaaccaccctagaggaatgggctgttgaagatgaattcagtgattctttttcctgaaggtccgctctgtgccaggcatcgtgcagtgctgaggctgcagaggtggacaagcccatgctgacaccgctcccgaaaggaggtggtcaagtagacccggaggaacctggcctgggggcttggctgccaggtgccctaggagcccccatgcctaagaagtgctactgctcccaacccctgaaatgtgacacgtgttaaagagagtaaagcaaataatcatcaatattgaatgggctgagattagcgacggagaagagggagtccttccaaattaataatgcattgaggactccttcagaggaggg

SEQ ID NO: 63737 - DNA, 878 bp, Bovine  19866880926555
  misc_feature (1)..(1): n is a, c, g, or t
nttgatggaaactattctgctattgcctcccaactcaggaggctgtagcatttgactgagtgataagaaattgccaggcactttctaattacaattatcatcatcgtggctgtctctcttaattactttcttataattagctgttgctttttcctcagcatttgtgtactttgcagatttgctgacatttgagagccccaaaatagggccatttggggaggagggcagaaaggtggggaaaacgtgaggggaacagattcttttcaggcaacctgataaatgtgggggcctttgcaataaggaaattggggaaaccaaaagatgggtcattttctcacctgatggggaaagagaacaggggtggggatgtagggattgggctttgtggagggtctcctagtgttaaaccttgcaggaaatactctttttttaaaactcattctgttgccctccccatcagctgtttgtttgtttgtttttaaagccatcttctagtttgatagccaaaaattagtgtttccttttttggggaggaaataactcttgaaaagtcaccaagctgccatttctgaggcttgggtttcattttaggaagcaaaattaaccctgttgaatccttttcagagttaattaaataactcaggtcaggagtagcttgttttccctgcagccagagatgtgttctgagcatctttacaaagtgggttgtgctccttgaccagatggcttggttttcacactggtcctattcttcctccctctcttctgacctcccgcagccttgtgtacagaggagtgtgtgcacggccgctgcgtttccccggacacctgccactgtgagcccggctggggagggcctgactgctccagcggtgagt

SEQ ID NO: 63738 - DNA, 1238 bp, Bovine  19866881048642
  misc_feature (1)..(1): n is a, c, g, or t
nccaacttgagaagctggggcatctgggaaactcctctgatgcccagaatctcctggagaaaacccatcaggcctgcgaaaccaggcactggttgctatcccactcttcttgagacacagcctctttccttctcacagattctcaggccacagaagagcctgcagaccaccctggccagctctcctctacttcagatttgccttgagaacagcattactgattttttttttttttctttattttaatgtgtgtcctctactcgcaaagagattgtgtggttaaagacagagaccttctttacttttatttccccaagtctaaatataataaagactcataaatataaatgatattagagctggattggagttcatcttgttcaacccttctcatctccctgacagtgagactgaggctcagagaggcatctgacctgccgaaggcttcctggtcctgcgcccatccttccacgacacctttgttgttgactgactaattgattgattgatgacaccattgaggaacaccagtagcaggctagaaaggggggaggtaaccccgagttgtccctacagggccctacaccagtttcctgaggaatgatgggaatttctcagaggagccagtaccactgcctctgactgcaccttaattcttaaagatatctccaggggtaaggggactggggccagccagcctttcagcaccaccatttcttctgatctgatgtcccactttccccaaacattttcctggggatgtagaaggctttaattagtgaaatgaaaagacacacttcagatcccaggcatcaatcaatactttttcactgtaagtgacagaaacccggcctaagatggcttaggcagaaaagaggatttattgcttcttggaaccagaaagaacaggggtagatgttgctctaggcacaactgcatcatgatagccataatctgtctccacctttggctgttttcctttgtgttgacttcattctcaagtgttctcttcccaaaggaatgacagagatggcaaccaacagttccaggtctgcagtctcccagcataacatctccaatggggagaaagcatccctttactcaatcattccagctaagtcccagaatggagttgcattggcctgatagggtcacatgcctatcccaggaccaatcactgtgaccagagaatggagtattctgattggccaggccttgggtcatgtgccctcctgctg

SEQ ID NO: 63739 - DNA, 1227 bp, Bovine  19866881248579
  misc_feature (1)..(1): n is a, c, g, or t
nagacttcccagcaattgagagagttcagtggggcacaaactagaccagagctgctcacatgaaccatctggggatcttaataaacacaggttctgattcaatagctgggaagggggcagggaatgtgggcccgaaaccctgcatttctagcaaactcatatgtgatgccaatgctgctggtctgggaccacatactgggtaggaagggcctggatcaccatgctttccagaagtctctgacccagtgtcatgaaatcacacactcttgcagctgatacagccttctggtcataaagtccatctgcctctggaaatttggggattccttcttttcttagaaaaaatgttacacatatgtagagggggttgtgtttttgtttgttttggctgcaccaggtcttggtggcggcacgcgggatctttaattgcagaatgtgaactcttagttgtggcatgtgggatccagttccctgactagggatcaaacctgggctccctacatagggattatagtcttagccactggaccaccacagaagtccctagggattcctttagaaaccccttctcagagacccccaaatcagatggaggctgttctgtatttaaaacctaggcagtaagaccacgtaaggctcctcaccactgtaatttaataactagcaattgaacagcaaattggtcccctccaattacctgatctttgaatcacagagcttgctttgggggcaagatatttactatgaaaactgagttgagacaggaatgttaccaaacattataaatagcactgggtttattttccacatgctccatactctgaaacgagaaggatattcacagagcatcagaatctaagaggctgcctctttcctctctgctcaccgcagcacagatacacactgccgaataagacatccttatgcgcaattaggttgtggatcacgtctgaatatctccttgtacatgacatttacggagaaaaacacttgcaaattaaatgtttgattaacattacatctttttctgttgaaaatgggtaagcataattgaaagctgcgttagtcaaagaatatgaactttataggggctttattctgggtctgagactctcaatatttttattttatccttagagccaatggcccagagtatttatataccatgtttcatgaaataatcgaaggttcagaagttggcaccccatcagaggacaattagcagag

SEQ ID NO: 63740 - DNA, 1621 bp, Bovine  19866881321528
  misc_feature (1)..(1): n is a, c, g, or t
ngcacgcaatcaaaatgcctttgaacctgggctgagagctctgaggtcctctcctgtttcaggtcaggggctggcaggaggctagggaacccttgatgcctaattggcagctaattgaagagacggggagggggctgaaagcaagttgttcaggactgggtgagtgatgctctttcaactcaatgtaaaagcaggtctattatgggttttcttgctggtatccaggcggtggggagacaggcttctgttgcttaatgagctcatggctcaagctgtctccagttggggagcaggtggaggctttcaaggcaaagttaacattgtagttagttctagttggctacctgtcatcactcaagatcaagagagggaacgatcttattaaaatgagcaaacagaaggcaagctcctcagcagagctctctgggtgggggtggggtctggacactcacaaagctgagaagagtcccagacaaatttttccctctcggtttgatacagaccacagagaacttagaaggtgctactatgggcatcagggggattcccaggtggtgctagtgataaagaacctgcctgccaatgcaagacatgtaagagatgcaagtttgaacccttggttgagaagatcctctggaggagggcatgacaacccactccagtattcttgcctggagaatcctatggacagaagagcctggcgggctatggtccatagggttacaaagggtcagacctgactgaagtgatttaacagcaacaagggatccaggcatggatctgagcttggcgctgggcattaaggtacaggcattgagggcatggctgtggaggctaacagacctgaattcttaagggtgaccctgggcaagttactaaatctgtgcatcagtttcccaaatctgtaaaatgaaaataataatatcacctacctactagggtagttgtagtgatgaaatgcaattacacagggcttagcacagtggcaagtacatggtaaatggacagtggcttgtagcagttatgattatgaaggaccaaggttgagtagagactctttgcaggcctcagagttgagtcccatagatgattcataggtagtgaagaagaggatgcaattacaaagtattagaacgacagccaccttagcaaacagctagtcccatcctctccctttgcaggtgaagaatgggaggtctagaaaaggaaagtgatttttcaaggtgacacgatgaactgaggcagtgctgagtctagaacaggtctccagagggccaaagctgcttctactgcatcatcagagctgaaccacagtcacaagccagaaacagacagcatttgcttgctgtctcctctttgcttgcatttttcctgccatgtgagagtgggttatggcagtttctcttgccatgttcttttcatgtctcatgaagacaaactttcaggctctgagagtggctgaatggagggtggggaggagaagctggcctggggtaagccatcagggcctgagagttttctgttatctgccaaagaacctaatggcaccagcagaacaagcagctatgggggttatagattgtttgacaagtgccccaaaccagtgcccgacttaagtatc

SEQ ID NO: 63741 - DNA, 1136 bp, Bovine  19866881327331
  misc_feature (1)..(1): n is a, c, g, or t
naaggtccagagcccctgtcatggccccagccccaggtataggaccctgtggactctgtggattgcagcttcacacccactcatctaggctaatcctatctctctgccatgggagacaccgaaggcctgggtgggtggtaccttccaaggcgcatgacagcctgagaggggctctcccaccagacagacctcactgtgtgaagcaagtcagagtgaaaggcacgctgggaaatggcggatgaggctgtgggatgagttcacacctcatgggagacaggcttgtaccccatgaccttccaatgtcctttcccgctcggcctgtaagttcaccttcctcagaccccacatctgggggtcccactcccaccccacagagcttcaccaaattccttttgatccccaacctctcccccagctcctcagcccagggtttgctctggagctttgaaaggggggtgaaggcaggccccgctggggagggtgccagcctgggcagcaggacccctggctggtctgtgtgtctttgccgcctttgaaaggcccttccaaaaaggtaattcctttgtgcgcagacatgatttatgagactttctgggcaaattgcagagataaatggtctttggggctgggaagcttcaaaggcagtgatgcaggcagatcagagggagccaggcagctgggagctggggcctcattaaaagcctctggtacggggaagggggcaggaggctctgagcagagccgaggaacctcaggccggcccctggcccatttggggcagccccagcttaccgccctgtacctcactgactccactgctgaagtgcaggaggcgcgagtgctgggaccaccgaggtgcatttatccagaggtgggtgcagcccggggcagaggctttgaggacagaggagagtggcgcatgaattctagagtgggttctgggagagaagggggagatagggcagggagtctcagctccagggacctcaccagcctggggtctcaccccccagcccatcactgatgacctggacatcccccttccactctggtctcaatatcctctgtgtataaggacagcgcaggtgtaaatgagttctgctgtgcttcccttgtgtccgatgctctcttgttca

SEQ ID NO: 63742 - DNA, 1592 bp, Bovine  19866881339109
  misc_feature (1)..(1): n is a, c, g, or t
ntgggtagccattccttctccggggatcttcctgactcagggatcgaatccaggtctcctgcattgcaagtgaattctttaccatctgagtcaccagggaagccacgtagggcaagggtcattacgtatttgatgagtacacagggaatcccaaaatagaatgacttgcccagggtcgtccatcaaaacacgtcctcttttccttcctcttttccctccccagcgccatgagagcacagcataatttccaggagggctgcagacaagagagcaggattcccatgtgcaatcattcagatggagctcttcccatgggcagcctggctaaggcgccaagaggttctggactctagccttcattctgttctccaagcccagtcccctgtatgggacaacatctgctccaacaggagccctctgaggttagctttcccccaggagcagaccctgagacaaggattcaaaagcaagcagtttatctaggaggtgatcccaggaagcactgggaggggcatgggaaaatgagacagggaagtaaaggcagacattcagggtgtgcttttgagcagctcactgctgtgggcgcctggggttccatccccctgaggaccatgaatcttttaagaacaggcctcagagttggcccctctgccctaggggtaaggaagctgagatattcttccactaactccccatctgttattgggtgagggatgcccccctagggtaatcattctcgagcactttccacctgccctgcccatgagctgctctgactacaaagaagcccccagcagcgcctcttgggtgaatagcaggagggggtaccaaggggtttcaggggggcactgactccatctgctaggagggcttttcactaacttgtaggaaggtgagcctgagggttgcctctcccttccctcacccaccctctacctactacccgagagaagtactcacctgtgtctggtacacttgaaccagttgaggatgtctgtgcagcgcgtgtagtagatttgatcaaaggggtgtgcgtatgattcttggacggtcacggcatagctgagaaccagacaggagatggaagctgtggtcagttcttgggaggtggagctgatattcagaatggggtctcccttcccaggggagccaggccccacagccaagtgtcaagggctccaacctcccctgcctgactctattctcctcctgccctgggtactcttgggtttcaaaccttcttgaccccaggtaagatgcaggacacaccccttactgtcttttgaagctcatcttttcagctcatcttctgaagttcgaattcatttgttcatttaatggagaatgaataaagtttgcatttattctacttggttctggaaggcccaaagccagcaagttttaaaatactttctgcttgttcatatctttatggttttcaaagtgcatgtatggaagctgatctttgctgcaacattatgaaataagtggtcacattttatagatgaagaaacaaaggcttagaggtggcttgcccaggtcacatagctggtaccagtaactgctcatatttgaatgtcctatgttaagtg

SEQ ID NO: 63743 - DNA, 1755 bp, Bovine  19866881472238
  misc_feature (1)..(1): n is a, c, g, or t
natattgatttaatagaatttagatgttataattataatttacagagttttagattatactaagaaggaaacagaagttgagatgaggctatcctttatttgaatgtattagaactgaggtggaagaatagcttttagagaaggcacagtagagcagtgctggcaagctcctgcctgcctgtgcaatgctgtctggaaagtagtgaatcctacagggaagaaagcagaaccgtagagcccttgatgtcaggttgaggagagtatgtaacaataccattcatctttaaccacctttgtgataaaagggaatgaggagttaatggagttatcaaaaaaaaaaaaaatatatatatatatatagtcttccatttcagattctcctggtgatcacacagcacaaggctctatttgccacaaggttagaaccaagtattgaaatactagcagtaataaaaatggtcatcagttgcaaatgagaatcttaagggtggagttcaggtaacatatagggcaattggacaagggtagggctaaatggattggattacagagtgattgaagtggggccagcaattagaagtggatttaaaatgtatagtgtgacccacgtggtgttggctttatgagaatgatattttcataaattgacttcatgtttctataacccagaacataggagttttgagcaagaaccttagagatcatctagtgagcattttattttccaaaaagtgaacatttacctacttgtgatttgtccaaggtcataaacatacaatagtgagaggagtttgaagactagaatctagatccccaagttctttgctttctctattacaaaaatatgaaatcagttctgagaactcagtattctaaactctccatgaagtaagctggatatataggaaaattattgtttaggaaaaaactgaaaaactgaaaaaactgaaaaaactgtagaccaaagcccaggcctcacaattcctgggccagtaatcttctactaaaccacattgcttcagagattaaaagaaaaaaagtgaaaacttaaaaaaatgccacatgtctaggcatagaattcactctttcaatctgcaggtattttactgttgttatatgctgggcagtcctctaggtgccataaaaaagatcacaagattaaaagatttattttgtaagaatagatttctattttgcaagactaaaatttgaaggttacctaattatcagggaaatgcacatgccttttggtagttgataagctagcaggaagtatgtcttggtataatacagtattgaaaacattttcactttcaccaaaggatgggtttcaaagtatctacagtattacctgctaccgtatttttgtgtgtgtatatatatatatgtatatatatatatatataaaatctgacaatgccaaggttattgaggctgtaggaaaactggaactcaatgctctactagggggaatgtcaaatggcccaacccctttggaaagcagtttgacaatacttactaaaatttaaaatgcatataccctacaatccagcagttccatttctgggtatatactctaaagcaattttttcaaactgtaattcatgatccattagtgaattgtgaaatcaatttaagggttataataaacatttatttttttacaaatgaaatagaacagaaataccagggtaaggattattttgtgaatttttgtgcaccacctagattctctctttccaggactaaatgatt

SEQ ID NO: 63744 - DNA, 757 bp, Bovine  19866880520179
  misc_feature (1)..(1): n is a, c, g, or t
nacggcgtgtgggagcttaggtccccaaccggggatggaaccctgcactggaaggcagactcttagcagctggaccacaaaggaagtccctagttctgtcatttccttcgcttctcagcccctacctgccccccttagggtcaaatatcagccctgcaacttgacagctgtcactgggagcctcagtttccactcccctttgtatctgtcaaaaggaggcattagtaatcagtgaagggatggaaagtcctgtgcggttgagaagtattgctatgccttgacctctcccctccacccagtccccatcctgcccttaactccaactctctcctgactcccccactccctccacacaccacgacctctatcctggcatcaggcagtcataaactggaagtgaaagtcgggggagactccatgcttgcccggcttcttcggaataccattggagccctgaacacctcctctgagatggtggtggactcaaacaacatgcgtgagtgatgctgaaagtttggatcagaggaattgatggctggggcccggggagaggagacaggcggggtgtttccaagacaaagagttaggggactgggccttggctatggtgaaatgggggtcggtgtgtttgcattagagaatcagagtaggaaacatcaggtcaagcttgaaggattggaggatgacaggtttgggtcagaggagtccagagggtcccccaaggtcccagcctctggagcaatgtcattcagtagaa

SEQ ID NO: 63745 - DNA, 1627 bp, Bovine  19866880561711
  misc_feature (1)..(1): n is a, c, g, or t
ntgaagtctcaaaacctgactatgcccatatgtttgaggaagctggatttggcaaagaagagccctggagggcaagggttctatggaagtcggtcctggagagcctccctcacttcgtgatggagagtgagaagatgcagccggtaatagcaacaaccgtcatcacatgtactctcccgtaaatcgtaaatcgtcttatttgattctcactgtgaggctgagaagtgagtagggcagataagactatcactactgtgttctcctactctacagatgagaaagctgaatctcataaatgttaaatgactcccaaaggcagactgaacaagtaaaacctgtctggatccaggtaccctgatttcaaatcacaagtctggctcattatgctccttctgtctcccagcctctctccacacgttttccaggaattctcaggccaccttatcaggtcactctttgctcaagaaactccaggggccccactgcctgccaagcaaaggcaggactcctggccttggccttctgagccttccacaatctggtccctttctagcctctgctccaacttacctctccctgaactttacatgttctgtgccagtttctccttagacttcaagccctggcacttggttggcatttcctttggattctgaatccttgcacattctgcttcctcaactgggaatgaatgcccttcacatttctacctgcccatcaaaatccagttaactccatgatttggtcatggaatcacattatgttcattttgagtgagtttcttaggagatctggatcaagatgatgggctagaagcacatggcgctcacctcctcccatagtatcagtatgttcatcagacattcatccagcctgtactgcatgtcatgggagttggggaggtctaggagctggagcgaaaatttaagcaaacatggtctctcacttttatgagcttttttagggctgattaaataagagtggctgctccttgtgtttttaaatgatattgggccccgtaccaagaaactgtaagtgaattaattcaattcaaacaataactatgtaaggcagatctctttttagcggaaaaaactgatggcttggagaggtgatcattttcacacaatgacaactaacacgtatatacaacttgctatgtacctgcactgtgaactcatttaatccttactacaaacagatggagtagttaagtccattttacagaagggaaaaaccaaggctcagcatttaagtcagtggtcaagatcacacagttgtcgcagtaataatgggaggggccaggattcaaacctcagctctctagggatttccctggtggcccagtggctaagactccaaatgcaggaggcctgggttccacccctggtcagggaactagatcccacctgctgcaactaagagttcacattccgcaactaaagatgctgcatgcctcaactaagactgggcacagccagataagtaaatatcttttttaaaaaatgatatttttatattaaaaaaaaaacaagctctctggcaccagagcctcatagccaaccaccactctattactgatctctagtgagcaggcctcatagatttgtccaacctccccattctg

SEQ ID NO: 63746 - DNA, 702 bp, Bovine  19866880638985
  misc_feature (1)..(1): n is a, c, g, or t
nctatgcctagtctgtagcctgaagggcagggcccacaagtacggaatgtatatgaacttgatgtgtgtctatgctgatttctacaactggagtttttttatacagtgttctttgtctcaaaataaaggaatgtgtttgtttttttggacatgattttctgcccctccttcctaatttatgaccattgagtcctgctacttgccaggctctgcactgtatcagtagcaagagggtttgaagtttttttcctctctccagaaataatgcgtttcaccagcccataagggtgggtgttttcctcctctgaggtttgtccaggacaggagtgctccctacagcagttccaggctgcaccccactctggaagttccttctgtccaaccgctgccccactcccaccctctcagcgctgggcttcggcatacttactcttcaggtactcacgctgttgggtgagtcaaggcagccgcttggaacgccagctgaggcatgcggcccgcctcacagccccaccagcaaagacgtgtgggaggctgggagggaaagttcccagcagcaagctggttggactggcgagaggcgggcgggggggggctcagtgatacatttggccagtggattcgccaagtcacagaaagttggcagtattggctgcagggggagggcatttcacacagactcggtgattcctggcagttcca

SEQ ID NO: 63747 - DNA, 682 bp, Bovine  19866880742624
  misc_feature (1)..(1): n is a, c, g, or t
ntccgttcctctcccctcagttaaggcaccacctccacgccagacaccagcaaacccagagactgaggaggagccataccggcgccggaaccagatcctaactgtgctggcggggctggcagccatggccggctatgccttgctcagcggcattgtctccatccagcgggcaccatctgcccgggccccaggcacccaggccctgggcatggctgaggaggatgaagaggaatgatttatcctcatgctctcaggactgatttttctactgtcatgcattccagaggctcctgtgtttccccattgttggtatggtggaaatggggtgccccctccccagaaataaaactgctcacatggactgagatcagacattgtgtcttttaagagctgccatttctcctagctggtacggggggccctctggtgctcgagtctaccctctggtgctcggcttcgttcactgcctgtgccttggtgctgacatctgcacaggcctggttctgcatctccaagaaagacaaacagttcccagttttgggtccggccttcctcgtctcttcctctccttaacctctctctccatccaccccaccccctacccctgtgtttgtacagacagtgagctcaccctgggccggggcccagtttccacaggcaaccagcgcatagcacacgctca

SEQ ID NO: 63748 - DNA, 1304 bp, Bovine  19866880756875
  misc_feature (1)..(1): n is a, c, g, or t
ntaccgcctgccgggcacccccccttcaactcccccttccagtccctccgccccccgctcctgctctccgcctagccttttcccctcccagccgcctgcctgccaggggtagtgagccggctgagcggcatggagacacaggaacttcggggggccctggctcttctcctcctttgcactttcgtatctgccagtcaggacctgcagggtaagcctgtaccaatcctcttagccccttctctgcctcctccccatttgtccccagccgactagcagggaacatgtgggccaaaggagaggagagaattctgaaattgaatcggagggaagagttgatgaaattatggccccgtgggggaggagttgacactggaaggtggtggatgagtgggagctggccagggtcagcatgaggccagggcagaggactcaggggctggatgctagctagggttgcctggctgggttggtgtctgagcatccccaggcaccccagggtctgggagagcagctcaaaggtgggcttcttccatccctgggttcctggctgcctaagaacaggatgggggtggggagcaagaggtctgggctctcctggaggtctggtggtgggatgggcctgtgggtgtgggagaggtagttggagcagatgacacaggcacagattctttactggctggaagggaaaccacagattggccaggacacaggaggcagaggagctgggtcctacgttcctgtgggagaaagccagacagtaggagggtcacagccttcagtgggcagctgttctcatctagaccgagtgcgccgaacccccagcatgggaggaggggcactaagagtgtgggatgagccaaacccagcggtgcaaagagaaactgccttcccgtttctgtgctgtgggcaccaggtgcttctactggagatcagcagtgactcctttgcgccacctggtgggagcatctcaagtttgtggggttctgtttctgtattttcaagtgagcctcaggcctgctggttcccagagtgccagtaagggaggcccaatgccttgtcctctgatagcaacaagggttggatttcaaggggtagtgaacactatggggtggggataacggatgccccacccctgaaggctcagaggagagggcgggccttagcatttaacagaggtctgaccttgatcatccctgcctggccagtgatcgacctgctgacagtgggcgagtcccggcagatgatagctgtggtggagaagatccggacagccctgctcaccactggggacatctatctcttgt

SEQ ID NO: 63749 - DNA, 1244 bp, Bovine  19866880790176
  misc_feature (1)..(1): n is a, c, g, or t
ntccttggatatattcttacaggcgcagacctgcctattccctcaaaccttccccggaaactggccagaaagtaaatgagtttcttgctttcagaagccctttctcctagctccaattccaagagtaaaaagtactgtatccaaaagtatcatctgttttcagacagtgagtacacatggttcctcaacaatctttactgtctaagcacctggaagttcagcacagtgttggaggagattagaggtgaggcttacaagaaagggttcaaatactcaacctcaaattttcacttactctcagggaagatctttgcttggaatcctttgccaaagacaagattctccagattattgaaggcctgggttgagggagttaaggcgtcggtcgtgccatgggggctgagacgtgcgggttaacgggaagggtacaagcctacctgaccctccacccttcctaccctcaaacaactctgcccagtcccccgctgagaggatacagtgagagagaagacgaaaaggccggaaccaagcaggccgccctggatggtgagccactcggtggaggccagctggcgactatacatctgcatcccagcgaagagcagcagggacaggagggaggaaagcgccagcgacgtgcctgtacccaccactggggcgggggagaggagagacggagagtcaggcccagccctccctgcaggagccgcaggcagattcagcaggtccgggagttcgagagcccgatcacttccaagcactccggggactgcagccaccttccccaactccccacacctcgcggcgaccccccaggaattcctcaccccgaaccctcccgccccgtggaaatgcccatcgcctggaacccaggacacgtcagctctgtggggagaggaccaggaaagctagtccacccaactccgaccccaactcgtcctcccgggttggtggggtagaggggatcccgttggtcccgttacccatcatgccctgcccttgggtccaatccgtgcttctgcccaggaggagagccgaaccggggacgattggctgtgcgcatgcgtcaaggcctaacgtggccttgtttctcccttaacgccttcctctttctccccctcagcgcctgagtgcagcgccctcttcctgcagggaggaaatattgcgtctaaggagcatccttggccaccacccggttcccggctcttccccgcacccagagcatctgcgcctctcagtgcaag

SEQ ID NO: 63750 - DNA, 1010 bp, Bovine  19866880851319
  misc_feature (1)..(1): n is a, c, g, or t
ntgaactccctccctgccctgtgccctctaggctggttccctccctttacagggatcaaagggcagagagcagccccaccccactccctggcaggctgcgggcactagggcgatcaggaattgcagggactctggtgcccaagcaaatgctcgggcaaggggttgccgggaggccagcacctggcggcaggaagacactggcccccatcctggggagtggaaccttcgataacttcatcaagctgtccgtagcccccttggactctttgtataggccctaacccgtgtactgcctcttgaggagatggcttgagaacagggtctcgggccttatctgtagtacctaggggcctgggcccgcctagctggcaccaaggcacaggggtgaccctcccccaccccaggcccacagttggcatgggtgctgggagccaggggggtaggagggagaggagggcaggactgccagcatcctggtgggtaggtgccaaccgggccgggagctggtgaggggcagcaggccagcggcattgagccagcagctgttggggggaaaggggaggggatattttagggggcatttcttgtggtcccccctcccagcccagcaggacctgggatggcctagtggctgggggacctagggcccgcctcgttacaggaataagagacccccagagttgtttaagtggaactttgtggcccaccctcctctgggctcagagccctcctgagttgcccctcaggcccaggcgggtcccacccaaccggccagggtggcagcagcttacgcaaggggtggggctaggcgcttcccagcagatgccccctcccggctccttcctctttcggtgcccacagctccccccatctgtccaccccacctcaggccagctctatccccctgatccccctggccactgggggctggcacaagtgctgccccctggcctggttggcaggggctggcacccgggcaaggaactgtggtatgtgagtgggtttggggt

SEQ ID NO: 63751 - DNA, 1085 bp, Bovine  19866880907664
  misc_feature (1)..(1): n is a, c, g, or t
ncgaggcctggagatgggctctcatctcagattctccaccgtttgtaggccttgggagccctctcccctccccaggtgctgctactccacttacctcccaggctcccagctcctcccaacgcctcccattccagatccttgctagtcaaggaaggttccccaggtccttgactttacccctcatcgctactcaggccactgtgccacctgcactatcccaactccaaagccccaaggtccttgtctccccaactcctcaactttccaatttttccagatcccaatcttcagtcttccagtaccctattccctcatcccctgaccctcaaaatttcccaactcctcaaggcccgggcccccagtttcctgacattctagctcagccgcccagagcactacctacttgggtgtttgggaatgtgtgtgggatgtgccccaggggccagggggtaggagctcttctgccatttggtgcccagagaccagggcaatgcttgggaacagttctgcccaaatgccagtactacttgccctgttgtgaaactgtaagtccaaggtccctgctctcagctcaggtcatctaggccctgtgggggagagggaccccgagaccctgcccgtgtagggtcctgaccagcaagtccttgaacactgcccgcagcgggggctgtggagatacgccaagctgtgcgggtgttgttgatctgcagctccaccgtgcagccgagcgatgctatcaccgcgttgaggttgtgccgcaggttggccactggtcctgagggaagatgccctggtagattacctccctctagagccaattaactttctccagcccatcccgagctcccactctgcgggcggtgaccaccttctagaactgtacattgatggggcccagaagctggtgagaggtcatctcattcaacccctgattttttttttttccttttgtaaatgaaagaggctcagagactcagaggaactctcttaggggacacacaagtcagaatagctgggattagaccccccactctttgttcttcaccaagccggctctcagggatagcccacccagagtcactgct

SEQ ID NO: 63752 - DNA, 1475 bp, Bovine  19866880918746
  misc_feature (1)..(1): n is a, c, g, or t
ngcatgtcagtaggcaggagcaagacgatgtaaataactggtgtgtactgatcccagggagtgattcagggagagcatgtgttggtggctgccaaggggaagcgaagagtcaattctgctcattttggctgtgtcctgtgcattgtcataagcccgcaggacagctttcccttgcagctttgtgtgtgagctaggggagcagggcctgatctctgtaagctgggaactagtaccagctcagtgctttccccaagatcttcagggacagggagctggctagatcaggtcttctatttaggttcccagccttacatggagggcctcataaagaccccacccaagctagactcctccctttctacaagttgggaggaaccgggcctttccacccaacgccctccccacccaggcaccagtgagtcaggaaacctggctttcagtctttctatccaggacaacctcctttcctccctgggtcccaaactgttcccatgctgactttttctgattcccctgtagacatttagaactttcggtctcaaggcctatttattatacatatagttcagtgattctcaaatagagagactgggggcaggccattcctggtattgggagggtatggtaagatcagccatctgggccagtaggctccccgagccagacttggaggagcgccaggtcctgctgcagtctgactggggtcctagccagcaggccaagctcctgtgcaccagaggtgcgctggaggtgggggctgggtacggaggcccagagatgaggcaggtctgacagatggcacaaactggaaccaggatagcacttcacttggtgtttgtggcccatccttggtcaagcacagccggctccgggagtcttgatggacgctggcctgggtgctataaaaagaagaatgggaagctgagaggcaggctctaccacagaagttgcaaccgtgcctcctgtctgcctgctctaccctgcccacctgaacgatgccggccatggtgcccgtggagtggaggcaggtctctgccaccattaatccagcagctccttgatacaccagcagcagaggaggatgtaggctatttccttcagggtccgctgcaggccctcccaccctgtgcccatcttcatgatgggaaccctaagtccagtgtctctcaggactcctccgagggagaagggcagggtctgggctaggggctgtgtccggggctgcatgtgggctgcagatgaggaagggtgtggtagatgcgtcctgtgccttttatcttcattgtccccacccccttcagacatcatgactgtgggcacaagggccccagggtatagcacaggaaggttatgggcccgagaatgggatgagtcagcccctgtgcccagggatgatgggatggggttagtaggagggctggccactccatctttcatcctccatggccaggccagatcagcttccctttttccag

SEQ ID NO: 63753 - DNA, 1872 bp, Bovine  19866881211125
  misc_feature (1)..(1): n is a, c, g, or t
nttccctgcctgcctggcagggtcttctatgggggagaaggtggcaggtgccctccagaccattgagactgccctggctcggtacagcctcacccagctatgcgtgggcttcaacgggggcaaggactgcactgccctcctgcacatcttccatgccgcagtgcagaggtgagctcaccccctggaggcagaccccagagatagagctgccccaattggctagttccccatcataagaagcaggaaggaaggggggtgtctgggtggggcttggcagggcagtagccacagtgaccagttctgatcctccccatatttattgagcatctgacacctacctggccctgggtatggatgtgccagccaccttccccgaccacagggaagtcacagtcctgtcgggaggtaaggcctacatactagaaacgggtgtgggctccaggttttagagatcagagtgggcttgccagaggaaatgggttcttcccttcagatgagaaggccgaaaagggagaaggagagggtgtctatcccagtggccaaagggaacagagcaagctctctggggagtgtttccttgcccatcctggcaagccaatggatcctgcctcctccccaggaagtgccctgatgctcaggagcccctccagatcctgtatatccgtagcatctcccctttccctgagctggagcagtttctacaggacaccatcaagaggtactaggggccttggagatttgggattccagagggacttggcagggcccattcctgactcccggcgctcttcctcaggtacaatctgcaggtgctggaggctgaaggagacatgaagcaggccctaagtgagctgcaggcacggcacccccagctggaggctgtgctgatgggcacccgccgcactgacccctactcctgcagcctctgccccttcagccccaccgacccaggctggcctgcattcatgcgcatcaacccactcctggtatggggaaggggggtttcttgccttcagtctcctgtcccccgtcagtcactgtaccctggcttcctggggcgggcttgggcttggatgaaatgagccccatcagccaagggaggcagtggtatttattcattcagccttttgatcaggttatattgagcactaattcaacagcaagcattgtggaccgaacagtgtcttagacctgtgctgtccaatatggtagccgtgagccatttatttacacttgaattgtaattaattgaaataaaatacaaattgctttaaaaagttgaattgtatactttaaaaagatgaatatcatggcttatgaattatatctcaattttttaattaaatacgattcaaacttcagttccttagttgtatgttgtactagccctatgtcaaatgactaccatgttagacagcatagatacagaccatttccatcattgcagaaagttctactggacagcacaggcttacacaaatagccttaaacagcctctccctttcctcctggaaattacatgccagcggagggtggattgagaatggggaggggacgggatggtttctctcattgattggcatacacagagcaagatgtactggagagtttagtagcaggccctccctccaaggctaggggagcaaaagaactgggataggccctttcccaggtggatgaaggtagatgtaggagggggagtatttgtgactccgctctgatgctggcctcccaggactggacctacagagacatctgggactttctgcgccaactgtttgtcccctactgtatcctgtatgaccgagggtaagctgttgggggaacaggatgggtatgtggaagacatgagggtgctgggactgggaacac

SEQ ID NO: 63754 - DNA, 1193 bp, Bovine  19866881341553
  misc_feature (1)..(1): n is a, c, g, or t
ntcattaagatatttacaccctgagtgaagccttgcacgctgtgttgatttatgggctacataattacataagatacgctgatgactgtttgcatgggaaacactttggattttttattttgttaatcagttttcccactttgagcccagcatttcaatcagagctccaggcttgattagaacctcccaggggtggtaaaaagactgcttggtaacagtagttttgacggctgtacattccttcagataaaaagtacctttggggggcttttcaaattacccattagttaaaagtatttttatcagtgatatcctcttcaaataatgctactaataatttcaacccttttcagatgagcaaaactctaataaatatttcttaacttaaaaaattgctggtttggttttgtcaattgaaattcactactcagaaaatacacccatacaacaaaaagtataccttctgtattcaaatgagctttatctgaaatcctaagtttttcttgggaagttaaagggaccatcttgaatgcagttattgtactgaaagaagagtccaaacaatgcaagtagaattcaataatacacccatgttaacttgagtttggctaaagcatggttgatgattactttcattccctgcagcagcctcaccctagtaattttatttggaatatcttgacactgccccttccattttatgggactcatctttcttttgcacctggattactggcctatactgcttttaaattttttactaagtataataaacatagggcttcccaggtggcactgtggtaaagaatctgcctgccaatgcaggagatgcaagagaagcaggtttgatccctgggttgggaagattccctagagtagaaaatggcaacctgctccagtattcttgccttggaaatttcatggaaagagaagccaggtggactagaggccatggggttgcagagactctgacacgactgagggactgaacacagcacacgtgacaaacatgtggagaatgcataaatcttaagtttgaaacctgagagatttccataaactgtgtttattttcataaacagacctgtgtaaccagacctagaaataccagcatcaaagaatccctgcatcacatgttcctttaaatcaccccccgacccacaggtaaccgccatctgacatcagcagcatag

SEQ ID NO: 63755 - DNA, 1961 bp, Bovine  19866880488854
  misc_feature (1)..(1): n is a, c, g, or t
ncatgggcctgaaagcacatcattgagttatagaactttatatacatacatttcaatttccccatacttttcttacataaataaaataaaggtcagtagaaaatagctggctttggcaattgtacatttcatttgctaaactggaatagaaattatagcaccctggtctttccattaaaagcttattcaggagtctcacagttctgcttttggtgcagtggtagaagatatttaagtaattcagttttaattttaaagcagtattaggtcagcataaaacagaggctgtatttatgccacaatgattgggtcaagagcagtagaattcagtatctcatcagaacacacagtcatttaatttcagagctttggataaatatccttagtgaatgccagctagtttatttgtctgagtgtttttcttccaagtgtgttaactattacagtattcgtgagtcaccggggccagaattagttgtaatcatacctccatttcctaagccgtcagttataatatctcagtgataatgctgagaggttgtccacaggaacaaagagcagagtctagagaatccgtgtcgttctctttgttgacccagtccattatctcctggcttgaatgcattaactcagcctccttttttctccatattttgtttgtttcctttgagcacaaaaaagttctggtaaagtcccgaaggggaaaaacactgctcaataatttcctcaaagttgtgattgtatcaggatacatactatataccatggatatgaatacgaacaagacttgtcttcaaagaacttactggtttgtaggccaggaaattattttagttaaataaagaatgtgggtcaactgtcagagcctttgtgggaaaaggtgagaatgcataagatgaattcacaagatttgccctaagagcataaaggtcaagaaaggccctccccctactccctcaagtccaaagaaagcgttcagattaatgacttgttagctaaaggaaactctaaatattaccactcgacaatgtagaacaacattccttgggaggaattctgaagacggttactctttgactgcttacttggtcttttctaggctttggggtgtaggatctgcattagtttctgaggcctgtcattacaaagtaccataagctgagcagtttaaaacaacaggaataaattgtctcacagttctgaaggctagaagtctgaaatcaagggccatgctccctctgaaggtggtatggaaggaactgttcttttatagcttgtagtagcctcagaagtcccttggcttatagatatgtcactctaatggttcctctccatatggtattgccatatgatcacagcatgttccctttgtcatgcttgtctctgggatcacatgcctgatcacagcatgttccctttgtcatgcctgtctccgggctcacatttccccttcttgcaaggacactaattgctctgatttaggaaagatagtgagggacagggacacctagcgtgctgcagtccatgggactgcaaagagctacttagtgactgaacaacaacaaaggaaggaccacatcctgagagtcaagactccacaatatcttttattattattatttgcatgtgtgtgtggtgtggggatggagacacaagtcaacacaagtcaacacaagtaattaagttaaaatgaaatcattacagtgcatcctaatccacatgattagtgtcctttatacaattcaacccataatggggtctgcagtgaatactgttgctactctgcccaggttctctttagccaaagtggcaccaactcctcacttgctgtgaatgttgcctcatgatggctcaaacagcccttttcctggtaatcaccgctggacacatgggaaccaccttgactcgtaggctacagccatgcccacacctttagcaggtcttctgcctcaatttggaat

SEQ ID NO: 63756 - DNA, 2014 bp, Bovine  19866880578288
  misc_feature (1)..(1): n is a, c, g, or t
naaaattttgtcaatatgtaatctgtatatctcaaagcagaccttaaatattctaaaggtaattttcctaaacaggcattttagaatgcttgcaattagagttacaagtgttgattgtctgcaatagcaattttcttgtcttagtggaaataagctgttcattattttaaaaaaagtatgtcaaccattatttatgtttagaatgctgccttttctccaaaagctgataaaatattcaactttctactgacagtgtagtacaatgtgaaggatgacaccagccttcaaagactgacaataaaaatccacattgagttttgataggttggttttaatatgaaagtaaaagtgttagttgattagttgtgtccaattatttgtgacccatggactgtagcctgccagacttctctgtccatgggatttcctagacaaaagtactggagtggattgccattccctttgccaagggatcttcccaacccatggatcaaacccagggttcccacattgcaggtagattctttaccatatgaaccaccagggttttaacataattacccttaaaattcttaaagagaggggactaccagaccacctgacctgcctcctgggaaatctgtatgcaggtcaagaagcaacatttggaactggacagggaacaatggactggttccaaatcgggaaaagagtacgtcaagtctgtatattgtcacccttcttatttaatttatatgcagagtacatcatgcaaaatgctgggctgaatgaagcacaagctggaattaagattgctgggagaaatatcattaacctcagatatgcagattataccacccttgtggcagaaaacgaagaggaactgaagagcctcttgatgaaagtgaaagaggagagttaaaacagctggcttaaaactcaacatttaaaagacaaagatcaaggcttttggtcccatcacttcttggcaaatagatggagagactatggaaacagtgacagactttattttcttgggctccaaaattactgactgcagccatgaaattaaaagacacttgctccttggaaggaagctatgaccaacctagacagcatattaaaaggcagagacattacttttgccaacaaaggtctgtctagtcaaagctatggtttttccagtagttatgtatggatggatgtggagagttggaccataaagaaagctgagcaccagagaattgatgcttttgaactggtagtgttggagaagactcttggagagtcccttggactgcaagggagatcaaacccagtcattcctacaggaaatcaaccctgagtattcactggaaggactgatgctgaagctcccgtactttggccactgatgcgaagagttgactcactggaaaagaccctgatgctgggaaagattcaggacaggagaagaaggaggtgacagagattaagatggatggatggcatcaccaactcaatggacatgagtttgagcaaactccaggagatagtgaaggacagggaacctggcatgctgcaatccatggggtagcaaagagtcagacatgactttgtgaccaaacaacaactacaacaaaaatccttctttatcttccagtttcaccatgcttacaaacagagtcaataaacatattcaagaataaaaaggaatatcagaaattatgatttttttaaaagtaggatattcagaacttgaaaattaagaggacaatgaaacaagaaatgtaaccaaaaataggctatccccactgtaaagtcagaaaagtctaactagttttgcaaacatcaagagaaactatgtcataaatgtaagctgctgtctttaataaacaacataaggtttaagcagctcagagctttaaagaacatctgaacatttctattatatgtgtgtattactctaggtcctctgagaagccaatgctaagtcgggattaaacgtgcaaggattgtatgagggaaatatttgtggagagaaaatggggcaggg

SEQ ID NO: 63757 - DNA, 1220 bp, Bovine  19866880813002
  misc_feature (1)..(1): n is a, c, g, or t
ncccaaagagttggacatgactgaccaacacatgcatacatattctatatcttggataatatccatcaacagactgacctgtgtttgtttttcctccactggatatgaacaccttgacaacaggggatatgtctttatcatcactgatctctcttgtggcagctggcacaatgcctgacacagagtgggtgttctgtagctgcgggttgccctggactccgctgaatcctgtcgctttagttctcctcataaatatcctcatttaacctagtcatgtatagcatagtgaattttctaactacttttattcattttaacttacaccaaggtcttgaatcctttgtggaattttgttgattggaaacaaagcatgttcctttcagtacttcatttatattccatttagcatgcaattttaattttattaccttcttaacatcttttatcttttattcaaaagggaacagcaaacgtgcctacatacatcagcggatcccagcaacaactgaaatgtttttctgaaacaagagaaatgagaagctttgatccctttctgccacttagggaagaaggaattcttctcagttccccaagagaggattcctattattagggttttttgttttactttttttttttttcaaattaattttatggttagcaaagaaatacatgtgtattgctttaaaattattcaaatgctaccggaagacttaaaatgaaaatccgtggttgttccttgccctactccacacatcaccccacccctcaatctccagggataactactcttttggctattttctggtatttacattcagctttctaaataatatgcttatatctctagttcttttatttattttaaacagctatttgttttcagtatgctatctatagtactttaaaatatttcagcatagaaagagacgtgtgtgtgtgtgtgtgtgtgtgtgtgtgtgttatttgggcttaattataccctgtgtgtggtcactaactctaatcataccttagacacagctagaattctaatcaggaaacctaccctccagaggccatcactacaaatgcttctgtcttgttttttttcccttatcccacagttttttataattagcataatgaatgttaaaaaaaaatgattttccataagcaaattagggcttgtaaaggaaattgaaagagagctcatcacaaaattaccagtattcaagata

SEQ ID NO: 63758 - DNA, 1458 bp, Bovine  19866880819953
  misc_feature (1)..(1): n is a, c, g, or t
ntgttttccttcattgaaatttggggttgtttgttactgcagcataatctagactattgtctttaaaacaaagatacctgtacttaaaagtactcattgtagtgaaaataggaaaataaaacataatgaataagtaaggcacctgatatgatagaaggtaataaacactatggaattttaagacatagagtaggtaaggagccaaggattaattcatatttaaagtgaaaagaaagagaggatgcaggttatagaactaattaggaaggtcagctaattaatgatctctgagtacttataaaactttcttatatataggaagcactcaaaaacttattcatttttacattatgtggctctaatataataaatttgttgactatagtactaacttttgatcttttcatcacataacttttcttaaaaattaagacaaagcctcacttcatagttcagaagttaggtttacattgccaagtttctgaaccttacttatttacttcagcacatacaaatcttattaatagtagatcttaaggcatcagtgttaccttatctgtgctatgggaataattattttcaataccatggagaaaatccaggttcagtatgcttgataattcacactatacatttatctgcttggcaggaacagcccgtaaggaaatagcatgttaatgttgctataatgtacctttcttcgaccctgctgtcagggtcaatactgcatgtgaaagcaaaaacagtgaaagagaaagaaacaatggcctaagttaagtttgcttttcttcattataccaaagcttgaatcagaggggttttataatcaatctgcaatcatcttcaaggtaatattttaaaggtaaacacgtttctgggtattaaaggaataatatccattaaaataatagaggttaaaaagtcacttttagatatttaaaatagaatttttaattaaaaaattaggatttcaaactaaagttctattttcctcattttgccaatcatctttgtgaagctgttaaaccattctacttctccaaatcaaaatgtaagaaacttttcttttctatcaaaaacactaaaaagtctttgattcagagacagaaaacatctccaaagagacaaataaaatttttaacttgtatttctaggaacttataacattgttatttattaacagggcatagttatgaaaggaatagcaaaagataaaaatgtgtatttattcattataaatacctccccataaaatttgaggaggtattattattattaaatattataaaatacctccccattataaatacctccccatagttcagttcagtcactcagtcgtgtccgactctttgcaaccccatgaattgcagcacgccaggcctccctgtccatcactaactcctggagttcactcagactcacatccaagtcagtgatgccatccagccatctcat

SEQ ID NO: 63759 - DNA, 971 bp, Bovine  19866881004993
  misc_feature (1)..(1): n is a, c, g, or t
nacattttaatatattacttgaaattatcctgccaataaaatacttagttctgtaaattttggctcacaaaataatgttcaaaattacactgaagaaagagtctgtagagtcactagatgaggcgaaaaggtaaagacttacttcctggacactaccagctcactgagttctcacttcccctaacctcttctagtatgtgtctgtatcatctaggatttgttgacatggtgctttctatctctagctggctattttaatgtgtatatcttgcttccttagtcccttgatgttttatgttttctcttcacaatgttatgggcttcccaggtagctcagtggtaaaaaaaaatctgcctgccagtggaggagatgccagagatgcaagtttgaggcaagtttgatcccatccctgtgtttggaggattccctggaggaggaaatggcaactcactccagtattcttgcctagggaactccatggacagaagagcctggtgggctacagtccacagagtcacaaagagtcaagacatgactgagcatgcatgcactgcacttcataatgctaaggtttactctctgtgcttagtaggcagacaggaaatcttttttgattggctggttgtttccctcagtaaaacttaacagaccacagacctgaggtcttggtatttatcagtaaaaccatttccttttcctgttccattgtgcagtgaggggtatatatactgtattcaattattcaatcatcttgctgaaaactgggagagtctatttctaactgaacataataaaaaagtaaaatcattgccattaataaataacataacatatgtgtctgttttccaaaagtaagcagagtttgaatgagtattcatgttgttcaagattaggtaaatcaccacagacaaggaaatttagtgccataactcataggatcagatcaaaacaacagtcattttctccgcca

SEQ ID NO: 63760 - DNA, 1902 bp, Bovine  19866881138226
  misc_feature (1)..(1): n is a, c, g, or t
ntcccgaaggtcacagggaaggattgatttagaatctgctctagattttaaaagtgattttttgttttgttttgtttaaattctaagggcaacataaagttaatttagcttatatggaaaatcaagggaatgccaatgggattatactactaagactctgaccttccatttcttcttctattgtaaacagtctggtgagcaggaactgatctttaactgtatgagcatacttctggtgaaccctccaaaaggtcataaacaaatgacaaatacacttgtccataatcccctaataacacaattaatgtcaagaaaaacaataaaacatatggtttgtaaaataaaatggatggctaggtttaaatattacattgactatgcaatgcattaagatgtgtttatacacattgttctttagagctagattgtttttctaatatttaacaagaatttctgcaaaaagattctaattcctgacatgtctgcagaataatatcctcaaacatgagaaagacttggagaatttgaataattgccatgaaaacaacagatttttatatcccccctttcaaatattttatttgagaggaaaaaaaaattttaaaggccactgtttcaataagtcagttctcttttatttcatactcaagtgtgtgtcatatgcttttggaaaagaatattcagtgatgacacaatgaatgttataaaccagatagaaagctaagcatgtagctaggcaaagtgaatgaaattttgtaggtgttagatcttatctgtccatagatactttatagaactctctctaaaataactctttcacagcacatggttgagttccttgcacctggagagtgctacagcacccaagggagagcagactgattgaggacactgaaggcaaaaataagaaaagaggagataacctctcattcctttcatatgaaggctgaatagtacagctatatcttttgtgcaaaatagaaaagccaaagagtagcttgaagcatcactggagtttcaatagggtaaattcaattcaagaagaaatcgaggaggagagttttaatttctttccttgtacctgtctggagtttaagagagtaataagcaaaatatctattaactgttttaatgaaacacaagaacttttgacatttttgagttcatatttctgtggtgcttcagtttttatggtataaatatttataacctagttcaatgatcaaaagagatgaaaaattcattgtttaaagagaattcaggagtcagagttatgctgcgaatatacttttacacatttattcattcaactaacatttgttaagaacattacgtgctgtgcaagtgataccaagagcaccaagtaagatgtctaccttaatgaatatttctagggattaaggtgatgatactaagggaggtcctttgtctctcagagaaatgaatcagcacatggggttcaggttttaatataagagaaacaggttaaggaggagtgaatcctttctcatgttaaaaaacacccctgggttggttatgaaggtagtgtcaggggaagtgtaatctcctcggttctgtctggtctcagcaaaaatttgaagcgagggacactaaagccctcagcgagtcacagctcttggacagtgttatagctcccttagttttatttagaaaataaaggaaaacacatcctctaggcgtgggggcatgatgacccaaaggactcaaagataagagagagagggagagggagagaaggagagaacgtgcgcgtgcgcaagagagagagagacaccccgggccctaggctcctctttttgtgtgttttttcctccctctgagcctgccctatgtaaactgggcgggagtgctgtttgttccacctgaggtcctcactccggt

SEQ ID NO: 63761 - DNA, 3193 bp, Bovine  19866881202844
  misc_feature (1)..(1): n is a, c, g, or t
naaaagtagctttctttctgcatacagtatctgctgtcaaggctgcactttctactgctctggttgtccagctatctctaatgttgctacagtaattataataatcagattttcagtgttccctcattcagtgtcataagtaataaattccctactaactacttccttttcagaaaacactgctgtttcctctgattctcaaaagaggtattactactattaggttgttactgatttctaaaacagtaagaaggaattctcttggtttagatgttcatgtcttttttaatgtgactgatgaaatttaagaagctcttctacaacaggatatcaggttataatgaccatctatggacagggaggcctggcgtgctgcaattcatggggtcgcaaagagtcggacacgactgagcgagaactgaactgaactgaactgacgagcctttggatttacagtatctgcaagcacatggcaatccaataacacaggcaaaatagcactttgttatggccacagaagaatgttgaattattgcagattattatgattgtagtacatctttcagttgggtattttcatgcaaccactccctcaacaaaattataaagttcatgaataatgagagcccatctttttcttttcacagaattctttgtatttgtttgtcttgcatctctatgtgaaacaactttttaaataaactatgaaaacctaggagagaggatgaaatggtagaaagggatcaacaatttttaaattaaattcatactggtaggtctttggaagaaaggaaaaacagaatttgtatttactggaatcagaccacagtgagctgactgtttgaaactaagttttgaattattaatgctgaaaaatgttttctataaatgtgggcagtaggaaaaagtggaaacaagcttagtagtccttagtctaaatatataatatcttggttatttaagaccttgtctgtgtacataaagaaaacaaccacaaaattaagcactataagtcaaaatagctatagttagttcctgtgaattggtataaagatacatactacattaatgtcattctccaagttatatattgtacacatggctcagacagtaaagactctgcctgcaatgcagcagacccagggttcagtccctgggttcgggaaaatctcctggagaatgaattggcaacccactccagtattcttgcctagagaagtctctagacagaggagcctggtgggctacagtccatagggtcacaaagagctggacacgactgagtgacgaacacttcactttcacacatacatacgtaaaatttgacattttgaattgtgtcagatttgatgcagaaatttaaaaccaacatgaatgaaacctgtctagactttcacatggactcaaagttccgggtgagtttataaactacccttctcatcagtcctctgaaagacagaagaccctgagatctccttttcacatgcagtcctcagtcccaagatggaccagaaacaatccattcccaaggcaagtgtggcttcacgtcctggtttctactcacagagtctttccacccagacttagtggtgtacatatgaacaaaagaatgtcaatgagctgtcctttataggactaaagtcaactcttggctaaggatgaagactgaagtacttacatgaaaactagctttctaaggactatgaagtcgtgctacttacacaatgatatatccttttccattgaacataaagtcaaaccttatattaagataaaacattttctggcctcaaccatactgataataaactatggtacaaaatgagcctctcaatctgttagcatgacattttacttttcttggaggagattaggtttgagtttgtattttatgtgattctatctccttctctgccagtgaagcaactgaagctgtctatgtccaaattctatggtgactcgaaaatccacagttttagctgtgctcttagacatcagttcctttattggaaaagtagccacattcaaacatttctgctgaaataaaggtagttatctgacttgttggtgaataaacagtctgccctgaaactgtcctgtgacagtttgacacagtgaacaagagtaagattctatttaagtagcaggactcacaggaaattagggagtaggagaacatggcttagcaaaagttcttattttgacaatagccatcatttgtcctttgaatctaggtcctaataatggtgataaatacatctttgcttaaagttacctatttgacagacaggaaaaaatggaaaaaaaccaacaaattctttcctattaggtggttttaagttagtatattaggctgcagactggcaatacaaaaagcatcctattaaatcacatcataaatgatccatgtagaacagtttatttttcattagcaaggtgaggaggtgtggggccaaataaatcaaaatgaacaaggcaataaccgttcctcccacaatatcaccataaatgtggaagtgataaaggaaacaatttaaagaatgttttattgatgaactcatttttatgttagaaaaacttcatgcctctgggaaagagttagcctattattttatgtgaaaagtaaaatttaaaatacaaagttagattcataaagcaggtccaggaagtactagtaattaacttaaaatatcagaagtgcaaaaaaaaaaaaaaaaaaaggaaactcttaaaaataacttctgacatgaacccaatggttgcaaacattaacatccagaaagtaacattgtctctacaatcttttagattcataatagcatagatttcacagaaatgtaacataattataaattcttgaaaatacacattactgaaaattggcaataacatcctcatagtcagtgagaatcccatagttcaaacatctcttctttaactttgaataggttatatcaccactttagctgttgttggccatacatagattttcgtaatgctgaaaagcaactagatatgagttagtgacgaccttccaatatatattttttctaaatcttatatgaaataaggaggacttaggagaagcttttctctgtttttaggcaaagggatcaaatgtcaaaactccataacaaacagcaaccaactctgcctcttattggattctttctacttaaaaatggaggaggaa

SEQ ID NO: 63762 - DNA, 898 bp, Bovine  19866881221959
  misc_feature (1)..(1): n is a, c, g, or t
natgaaatgtgtttttagtatatcacttagaaatattttttcagcttcaaaattcattgtcaacttcaggaaaactgttctttagtttctttcatgtataagctgttaagatttcctatgcactaattttaataccctttaaactttagtgatacttactatctaggttgtcttcagttcactcaagttaggatgtcaggaattggcacagcagataaagaaagattcctgcaagccttttttactctggggctgctaatgaaagcttaatggtcacagtgataactacaaacacacatgtgaaccccactaaaccactgaaagatacccccaattagccaaatccagaaatgcctatggccaatccaaaggtacctgacaatattgtttaataaaattctataaactatagaaagtctgaaaagtcagagcaatcataacccactgaggtttaaatatcttacttttgcaagttttgctgtgtaaacacatggctcagtgccctccagaggctgtggaagaggcccaggcaagtggagccctgaagctcttcacttcatggaaaatccacttctgtcagagtgtgttttttaaagacaaacaggctacgaggaatgctaaaaccatgcagcataagaaacggttgcgggaactagggatttttagcctggagcatggaagacctagagggacatgattactgccctcaaatatttgaaggactgtcatgtagacgtctgtccaggcagtcactctgagtagctctggaggacaaaactaagaacaatgaaaagaagttacaagcgaggaggtttcaaccaactacaagaactttctaaacgattaaagtttctcaaaatggagtgaattgccttatgttgtaatgagctccctgtta

SEQ ID NO: 63763 - DNA, 4066 bp, Bovine  19866881332267
  misc_feature (1)..(1): n is a, c, g, or t
ntttttatctatttttagtttctcttagatgttcttgtgtgtttgttcttcttaatgggcttcagtgtgaacttttctaactctgtaataaagcctgttggtatttttattgagattttgtgtaatttataagttaacttagggataactgtctgctttaggatactgagttatcatatgcaaggacaggggtgtctttccatttgttcaagtctactctagagtctttcagaagaatttcaaagttttattaatatatgtttttctagatttcttgcttatccctaggtatttaatcttttttattactattataaatagggttttgggttttccctctcataatgttctctataactgggtattggttcaaacattgttatccttgctttccaagtattatttcgcttaattctcacaacaaacacatgaggttcttttcagtaacatagcctctgatagatggcaaggcaagggttctaaggcagaccatctgatttcagtgtgctacactgcctagttcccactaataattcccttgagttttatctaaaattatggacaccaatctaacatattttcataattcagagagaatccaaaaaagcagagagtcaaactggcaatttttgaactgggaattctgaccatgtctaacagcttatctccaaaggacaggggataatataagagggagtagcatgaggtgttttttctccacaagggtctcttggggcctgaattcctctcagattctatctccaaccctgaaataaaggaaactggaaaaggccacaactctctcggcatgaaaaacacagcacacattctggttgaataaattctcccaggtattcccaacgttagcggaataaatgctaggaaagaagtgggagcccctgataacaaaatgaggagtgagaggctcagagcagctcttaggagaagaggtgtcactggaaagatatcatgtctcaaggccccagagatggtaagcaatagccctaaccttgagagatacagcaaaatctcaggaattaaggcagttgctacaaaaatgatggacatgagcacagtaaccatgacagtcaagaaatgacagtcatctttgtaatggaggaaaagtctaagagaagcagagcacactcacctcctcccacctctagtgaaaacctggagaaactcagtagtgactacaggcatgacagttcctatctgaggtggcaaagagggtgctctactgagcaaacttacaggatctacactagccgaggcttttgtagacaacactgttttgtcctttggagaatcccatggacagaggagcctggcgggctacagtccatggggtcacagaattggacacgactgaagcaacttagcaagcacacacctttgtacttcctcgggctgctaacctagaaaaatctgttaaagagatttttggtggaatagatttctctaaaaatgaattttctcagcatgagaatgattaatgagtgaaggcctattatttccaggtaatcaatatcaaaatgcactctctgaagtcatttatttttcctcattatgcatcacagttcagtcccctaatgctgtaaggttaatatacttaggataatatttatgctgctcatcccaaggttccacgttaagcataaaggctgcttctaatgcttgcatctattttttgacttcaaaagaaaccatttctcttgatagaagttgattttcaaaagacaatttcctactgaaagacatcatcagtggagtttctggtgatgaattaagggccttttgatatgacagattccctgctcagaagaccataagaaatagccacaattatggtgctccagactgtcacccttccagtcatccaaacaccactgcaatgttcagatgaaaaagaaaattatagtactattcattataaatagcaacataaagtgaattcaatttgtctaggaaaggaagtgactattggtggcatctgtcctatttactcaatagccagcattagtcacttaggggtttggtttccactactaaaaagaattgttaataacaggccagagaagaaacaaaagttatgtggaagaagagataagaagtcagagttcctcatatggcactttattgtagagaagggagtttttacttatatttattcagttggtgagaggtaagagagttaacagggaacaaattgtatattttcatttcgtgtttgtttttcagtagtttgaggcttctgggacttcagatttccatagcagtaactcagctcaatattatagcatgtatcaccttggaaaagcaattgcagaatgcttgtttgtattctctttgtgctctgagtgggctggaatcattctcttcaaacatcatttacaactcaatgtaatgagcacatgtagtcagcaaggcttttaaaagttaatgagaaatagaaaactttgagggggttatttctcactgtgctcagtgtcgacaactaggtctttcatttaaaaagagcatttctggctttgccatagattgcatctgcaggacaatggactgggagcatagacatctatcttgccttgaacctaattaagaaagagaaagcaaagaggggaagaaaaggaagacagagaagcagcatggaaagaggaagacaaagaatagcacagttttatttgagcatctgcgggacagggaaaatggtcttatcccaggtgtaaaattactgaggaaacagccctggcattcccaggaaagttggaggagaagtcaaaaggaaaaaatcacagaggagaaaagtgaaaggtctcttttccctggatcatgattatttttttaacttcagaagaggcaagggagatgggaggcctttttgagataattaaatgagagaccagaattaaatttaaactatagcagagcatgttcaaggagaggtagaggccctccatttactaattattattaaaggcagagaagtagtaccaactcttgaaaagaacaatgaattcaaaccctaaaactcctcttggctccactgtccatggtttacatggccttgacaatttaatgaggctctctgaatatctcagaatctctagctttgggctagagatcatttctacttccggcacatttaaattttaaatttatttccattagagatactgaaatttggagttcttttttaagtaatgtgaaaagagcagagagaaatttgtgactgttaagcacttttgtttttaattatgcttagaaaactccttaagttttctacaatcacctttgtattttccactttctttgtcctgaaatgtattcattctaatagtgtaacaatatcattctcccttatctcaatttctatccattatttcagagatctatattatttggagaaggacagggatttggagaattagactaaatactgtaccaaggcaactaacagcattctatctgtcataatcaacaaattaatcactttgctatttcaacacatttgtaagacattgtttactactctataaagtgtctgtgcttctagtataatttcaatatttattcactaagtgagtcataaaatcccatgatttacatactcgaatactttttccattctatctctcaaccatcagagagtataggatattttatagctaccttttgagtttaattctggagcctaggcatgtatcaaacaagatccagtgtaacaaaatagaacttggatataaatgttacaaaaaaaaaaaaaaaaaaaaaacactaaaaacggctgcatattttgaaaaggtttttccaaaaataaaacgaagtgtgcacatctggggggttctaccttgaaccctcaaactaatttcttggttatcctaagacaatggagatcccaagtagcttctgggttgagtaactcgtttgcagtttctaccatatttgaaaagaccctgatgctgggaaagattgaaggcaggaggaaaaggggatgacagaggatgagatagttggatggcatcaccgacttaatggacatgagtttcggtagactccgggagtt

SEQ ID NO: 63764 - DNA, 416 bp, Bovine  19866881924222
  misc_feature (1)..(1): n is a, c, g, or t
naattgtattttcctcctctcttattttatggaaatcggctcttctgaaaggtgtgcttagtcaaggagtaaataacttccttcagaaaccacataaatcttatctacatcacttgcatccttcagtgctctgggaagcaatataagttctgaccctcaggtctgtatgtattttgtactatctctggaattttccctccctctctcattttctcagttccacgttgaagacctctgatctctgtttggtattgccataatgaaatcttgctcggaactctttttcagaagatttttataaacattgaaaaaaaaagaggattagaagtaattttaatagataaaaatgttgtgttcagaaaaatttataaaataaacttttttttttctaaaagtacaattcttttaaaatacaa

SEQ ID NO: 63765 - DNA, 944 bp, Bovine  19866880233635
  misc_feature (1)..(1): n is a, c, g, or t
nggagcccccccaaaataaagtcagccactgtttccactgtttccccatctatttgccatgaagtgatgggaccagatgccatgatcttcgttttctgaatgttgagctctaagccaacattttcactctcctctttcattttcatcaagaggttttttagttcctcttcactttctgccataagggtgttgtcatctgcatatctgaggttattgatatttctcctggcaattgtgattctagcttatgcttcctccagcccagcatttctcatgatgtactctacatataagctaaaaagttatccataccacttgcacgcacacacacacacacaaatctgttaaagacatcagagaactattgaaggaactatgacatgaaatgaaaatatttacagagatagagagcttcaaatatgagcttacatgtagtcattttcctttgaaggcatttattgattctatcacatgaagaaaacttgagaatccatatttcatgtggatagagagccactgatgagccacagagaaataagcagtcttatgagactgggtagataaaattggaaacttgagggcttaagatcacagtgagaaggaagagatagaactgggcctgatatacagctcgttttccccccaggatatttgctgagttctgaagctacaaagaacaggagaacatgaaactaagcagaacatctataaaaaacagaattttttgctgtattgctttactacaaaaaggagtgttgagtatagaataccatccaggaggagtgagtggggatcatggtgaacatcagttcagttgctcagttgtgtccaactctttgtgacaccatggactgcagcacgccaggcctccctgtccatcagcaactcccggagtttacttaaactcatgtccatgagtcagtatgccatccaactatctcatc

SEQ ID NO: 63766 - DNA, 1524 bp, Bovine  19866880373014
  misc_feature (1)..(1): n is a, c, g, or t
nttgtttctgctgactgtatagagcttttccatctttggctgcaaagaatataatcaatctgatttcagtattgaccatctggtgatgtccatgtgtagagtcttttcttgtgttgttggaagagggtgtttgctatgacccgtgtgttctcttggcaacactctgttagcttttgacctgtgtcgttttgtaaatcaacttagataaaactttgtcttgctctgtgtaataatatgtgtgatatattagctttgtcttttctaatatatattaaatttaaaacatagctattaaaattaaaaatttagaaatctcttgtctaccttaaaatttctcatattttgcctttagtacaagtcctgtgttttgggaactctacgctaaacatgaagagagaaatgttttcacagattttgagggacccaatcagcatggaccaggggaagaaacttaatattatgtgtttgcaatttaaatcctgcatgctttcagaaggatttaaaggtgacttaagacatgaaagcaaaaagaatattaagataaaaaaaatatagatatcagaaacttaccaaaagagaaagcaaatatactgtcccttcaggttaaaatagctactatgttgagtattaaatttagttctgtgccttctgggaaggtcagtgttatatccaacttgctcacgggtctatgacctctgttgacccttgttatctaagggagatatacccatatggtgaagtagagtattctttttctatgttaagaaattttgaagtttcctagaatttctatcgaaaattcacatacccagccatcagtttcaaacctgacagctttcactaacagatagagtgggagagctggatctgtcaaggtgagtggtgtgcgcaggagtcagttggtgaggcttgatgagggacttgcctggaagaggtgagtgtgcatctgaggtttgatgttatgaatctgtgggaagccagcactgtgatttctgtgccaactattccagctgcttttgctatttaacaaatcacttttaaacttagtagaattaaagtaaaaattattgtatattaaagtctgtgaatgaactgggggcacatctgggcagttgtcacttggggtctctcatgcacttaagagcagctgtcagcttggtgcagggtcatttgaaactcaactgggccagatgttcaagatggcacactcattggctacctattaataccggccatcagcctgaatttttggtggcctggagcatctagacatgcttttgtcatgtggctctagcttctcacagtgtagagaattagttctgagagaaaatgtctcaacagcaaactctccaaaaagcaggaagcataagctcccaggctacttaagagttatgctcaaaactggcatactaccacttcttctgtgccctattgaagagaaaaatcacagggttcattcagattcagagaagttgggagatgtaaactcttaatgggaaaatggaaaggtcataatatagaaga

SEQ ID NO: 63767 - DNA, 3784 bp, Bovine  19866880488958
  misc_feature (1)..(1): n is a, c, g, or t
ncacccctatttttctgtcaaactactagatccaatgcatttttctctggcctccctggaagtggaattgtcttggtctttcccctgcagagcccataacataaacacaagagcattaaaatggaaacaggatcttggttctcactgtttcaccaggcttcttagcactgacctctgaccctcattaagatcccatggaaagtctgggcatctggggtgtgtatctcactgtgggaatttttttgttgttatgattgttgctttcctcctcctggattattttggcttaacctggggctatgatgtaaaataagccactttcaagagcttttcctgacctggtttggggatggggtttagaggatgggatttgactatgctgcttttgactcaaagaatccattttcaagtcttcttttaaaattcatgtgagaaaataaaatatagcatttcttacattctcttgcattaatgacagttaagttcttatttttgaatacccatgtggaatttttgaagatatcgaggcttcatgattttttctattcacttgttatgttttttaaagtaggtctctggatcagatattgtcccccacattttttgatttatattgtatcacatcatattgtcattaaagaaaatatctttcttcatattttgtgggaaagatctcggagaagttagtttttttttttttttttaatggaattctttgtttcctggattagtttgagaggctaaagcccagaaatataattggaagggaattttaactattttggttgagtgtctaatttatgtacacatttagtggttattagtagaggatttagaaaattttcaataaattcagaaaagcagtcatccactatgagatagaataaatcctttcttctttggttggatatctctttgcatatctctgggtcatagacttccattcaacaagggccaagtttcatcttaagcttttctcatctatcatagactttctcatggctcagttccagttgatgtaagagtaactagtaggaagtgttgtgctcaaagaaggctgataagttttttttacaggtattttagattttgtttttaagagaatattaacagaaacaaataatctttatagtattttttctcttatgaagaattcaatatactctgctgtaaaaattctgactagcacaaagtatttttattttgaaataaaaaattgagattcaaaggaaggtgagtgacttgcccaaagtcaccgagtctcattgtacacaaaattcacatttttttttttttttttacctctagtactctgtctatgaaaaagctaggaatgtatacatgtgcccattcaaacttgctatataaaagaaaatcgtcttttccaagatgccctcttttactgaaagggcatatgtggaatatttaaaaacttcctaatagagttcattttttgctttaattttattttaggatttatgtttctagaaggcagatatatatgtaatttctatagcagtcaagacaaatgtcaggaggagaagcaaggggacaatatatgaatgctagattaaacaggcaactccaggaggctatgaactaggtccttgctgtccacaccattctttctcccagaagataccattctctcttgcactcttctcttccaggaccagaccttttgtaaaagtttcctcttcaataaagtctcctttactgacacagttcagtcatctatgaatatcaagataagtcatctatgaataccaagatagcttcatttcacctcacatgtttttcacaccccttattcaggtttttgttttgtctgttcagtcttttatttatactccttttataaatcacatttttttaactccaaagggcctaacatatagctccatgcagggaaggcaatcaacataaacttgttgactgatcataatatgacatgaatcatgaacacaataaattacttgacaatgtataggattaatacaactcttctgtgtggagatgggatggtaccaaaagaggaatgtgtctaaaagctcatggatcctatttagggagctccacatgagagcatgctttgatctggcaaagttgagttatctttattaataacagctctttggaaattcaggtatttttaatatcttgtttgattctcacaagaaaactgggagtcaatatatattgactccattttatggcagcgaaaactgaagctcccaaggatttagtgatttgtccatattcacatcttgcaagtagttgaaccttgaacctagagtattattttgttttgtttccatttacctctggggttcatactctttccaacccaccaggctgcttctcattccataaagttatcactgcaatgctcacagtttgtgattcattttgaagtaacaaccctgcttcaagtgatatatgcaaacatgattaaccaagagagccccttgactactatacacttggaagcttctagcataataaaattgtactgaaataagaggtcttaaagaactgaaggttacatgaaaaagagccacatgtagctcaaacactacatcctgagcatattgagttctcatgcttcatttgaccaacatgattctggctttacctcagaagaaagtttagtgtaatcttctgggcgaactgacccaccagggggaagattagaacatccttaaccttttctcagaacaaggagggtacatttagtagcaactttctgaaggggcagaaagtccaatatgtacaaaattgtcaaagagagatgacctattcatgcaaaatagtcatttccataatgtgctttcagaacaatgtgaacaatcacaaggcattagtaaaacttcagttaagcaatatagagatactggtggaattaactccttcccatctaccctcaaacaacaacacctcaccatctgtggtacttcctgtttgttttatttttaagcctttgtttggtcttagctagtttagacttcatagcctccaatttcttatgaagcgtagctgttctggctcagatctttacactgaaccccactgcattgcccaccccaagctgtagagacccagtcttccagatttagtagacataattaccatctataaattttatgtgcattaaaggtggtttccccctcttgtaatcattattaatatttgatggccaaggtatcattctttattgataattttatagatcatagttaatttagaaagaaaaaaaatcagaactgtatgcaaagtactgtagctccactttaaaaagtgaccttgtcaaagagatgcatttttgcttcaattaaattcaaagtcagtcagtcccataggtaatgttagcaattataagaatactttgcaaaagtagttaaaaaacactcagagaacttttatgtgatgctagtgtttaaagcaagaatgactttcttctaaaacttcaattctttatgagatcattttggagtgtactgttacataaaacatgaggtcagtaactaaggctaattaaattttagtaggagcaaaagtcaccaaaaggtttttgcattcatcctaccaattctaaaacagtggtacaatacaccattaatagccttagaattgctaattatttcaacatgaatagcgatatcaacgctgtcagtttaatttaatacactcaggagaattcctgcagaatgcatgatttctctattatttcctggttttcacaaccactaaaagctataaattctctttcttttcttcagagaga

SEQ ID NO: 63768 - DNA, 909 bp, Bovine  19866880492020
  misc_feature (1)..(1): n is a, c, g, or t
ntattggaagcatcataaacatcatgcccatctgtcacttctctgtcatcatggaacatatatagcctgtaatcattcatagcaatatctcatggctctggtaaaagcttatgaataaccttctatgtccagctgtgtatttctgagtaattagataaatttaaaaatccaacaaactaaattctgaacgatgactcagtggcaagaggaatagttaaataaatgagtttgtttaagtggaaaacctatatttctctgaagtagagcaatttgcaagaataactgagagaaaaacagtttataaaaagagaatttgaacttggaaaattttaaatgtaactatagtgatatgttagaatttgattgaacaacattttaattatggtcattttctctttgagcttttcatttcataaatttctatatacatacattggctttgctctttttctagaacccaatagattaattttttattgtgttgagcaatgtgtattttggattatgtgtgtacatgatcctaatattgtttttcatttctcatatctgtatctaagcatgtgcacacacacaaagaaataaatgatatttgagaactactcagctctgaggaaggagaacaaatacttgacatgatttaatttatctacagtaaaatacatgacagaaatgatataagtaggagttctgaccaagcaaaatttactatataagcatgaatataataaaaataatgagagattttgataaataataggcaatgaacactttaaattattaatcacacaattggtattataattttagaaattaaacaagatgttctgtatttctttactgacattaatttgaaattttccacatttaatttttagttgtatctatatacaagcataattttaacataat

SEQ ID NO: 63769 - DNA, 2033 bp, Bovine  19866880563483
  misc_feature (1)..(1): n is a, c, g, or t
nctttgaaaagtaaatttccagagtggagaatcaatttgttttgtaagaagccattctcttaaatgcagaagctttgggtcactgctaaaagtatttagtgacaattgtggtgacagccccctgatgatctgtccaaaaaattggcttctacagcaaatttctatatttgccattcagcaggaaattactcgttttatattatgcttttgtaactgatgtttttggaattatttgttgtagttatgactgtagccaagtttacaaattgaattgtataacaccccttctaatgttatgagaaataaaatcttttgggttgaaatagtgtatatttggtctagccaaagaaatatgagggaagcctagaataaaataatatgtcccatctgcatgagagattagtgggctgaaaatatcattattactataagtccacagtatacttacactaaaagtctgtaatacacttttaaaataggggaattataaaagaaatacctccaaaatagacccctaaactgcagtgtagctgaagatgaaaactccattagaataaatggataaatgatcataaaagtatgactttttaacaacaaaaatagaataaaatttgaattaccattattcccataatcactttagatatttaatttctacatgtgattgaagctaaattttgatttttataaactcaattatactttcctattgcctttcacattcaagatgtcttattactaattttaaacccaaatcataatgagatttagggacaaggtaattttgtcagcagtgttttatacaatgtgatatttgagcctattcaatttttagataatttccccaattctatttttgagtgataaggatgaatgttgaatgatatgaagagaagggaaaggcctaaccttctccagatagttctcatttaggatgtggcatcatttgcacttcctttcctaggtgaaattctgacattcgaataattggagggataaacaaagtcttcaggtccaattccattccctccagaagctgatatgcatgacattcgggtagtttgtgtgtgtggcaggggttggggaggggcgggggcggggccggttggagattggaggagaagtttcctgaaaatcccccttgatccccctaatgaaaggttacttttctttggaccaaataatagttgaccagtaaagcaaatctgatctaatggattcaggacttaggaaactataaaatgagggaagcacagaatgagtggcagaacactggataagaaaaacagagcaggtgcaaatgatgaaggaggtaaggacaagttctagtctcatacttccagtgtgtgaaaagcaggaaactggggctcagggaagctaaataagttggcaaaggtgctgcaaactgggtagactgataatttgaacctggaaatggcaacccactccagtattcttgcctagaaaatcccagggacagaggagcctggtgggtttccgtctatggggtcacacagagtcggacacgactgatgcgccttagcagcagcagcagtaagcaacaccaggatagcatttaataataatattcctagccagaccaaagataatctccataatatctgctactagaaaaagtgtacacttaggagttaatttttaatttattttaaattcctcatctccagctgccttgggacagaaagcttcatttcctttgccccagagccccctcagtgagtgctagctagtcttttccttaagccttgagcagcctgcagtgacctgcccttgaagtgcaggtttaacaacctttgcccaagcactctctggctctttgtacatctttaatagtttccttgacggactatgaagaactgccagatgacagttctatttcatttttgtcactgcctagtgctccttttttctctggctttttctcaagggcatgattctataagtcaatgtggcaatgttcacgatggggtattgctctttcaaccactgtatattgatgcagtgcgagcaag

SEQ ID NO: 63770 - DNA, 1612 bp, Bovine  19866880588856
  misc_feature (1)..(1): n is a, c, g, or t
nacatcaaaattaaattgcaaatacattaaatgaaaatgatcaacaaaaggaaaaaaaattataaatctgttaatatttcatgttgatgtcaactttctgtgtcatatttaatttttctagaggagtttcttaaagcaaattctgaaattaaatggtctaacaggaattattagataaagattgacaagggatttcctagactttgattttgagcttgtatccccaaatggtcctggtggccctataaccagccctaccaggactttggttcaagcagcaaatctgtgataatatgagaaatggaaaaagaaatattgtcctggaaaatatgtttttctagacaagtctatttttctcatgggatgatggaatttcccaatattgtggtgataattaaattattactcaaatattatccttagtcatttcactcctcaaatgtgatgagggccccataagggtttgtagtaagagaaaaatgcattgaaataattagtactaaatttccttaactcttttcacatttacctaatgtgatgaaaaagctatctaggtttaaacaagggtaggaaaataaaattgaataaacagcattcatttattcactctattcatctattcattctgtaaaacgttagtcaacatcccaccatgaaggtgaatgtctctttttctgaaagcattatttactgagtatttccaatatgtcaggcatcttgcccacaaaatggtacaacatgaaagagctaatgtcccctgcatataagttcatagtctgatgaacattttcttctactggtaccaacgttttggccttcgtcatacctcctgccaagaggcaccattatattaaagcaagccaggcattccatgatttcgtaatatgcagtgctcttagaggaaggaagtgaggttcaacaaccatgaatagaacctcacaactgggaagcactgagagcctactccataaatacttgtatgttgtttaagaatagaaagaaatacagcatttagagggaaatattcctttggcccaaggggaagagagtacaaaagaaaaagaagcaagaaagcaaaacatggaaaacactcttaaaaaaagataaagaaaagaaagcagaaagaaaaagtgaaaaagtgttagtggaagagtctgcagatgaacgttatatactcagattgggaatgatagtcaagtccccagaaagaactggaaggccattctacttcactccaccgtatctgtagttcgacttacgcacaagtcttatttcatttccattatgaaaaacctagggtagctgctgcattatacgatcctcatcagtcactgacatggccctcgagtaaataatgatctcttgtgcagcatgatgctgctgccagtaatgagcatataatagtgatatattagcatgttaaataatgacatgcaaagttacagtgtatatgttgatgtcatgtcactgctaacctgctacttgcactaaatttgtcattctcaacgtaatgtgttgttccagatggaaaatttaattttatctgatttcccccattcacttgcagctctggataatcacaaaccactttgggctctctcctgtctcccta

SEQ ID NO: 63771 - DNA, 1272 bp, Bovine  19866880634265
  misc_feature (1)..(1): n is a, c, g, or t
natggctggatggaatactgactcgatggacgtgagtctgagtgaagtccgggagttgatgatggacagggaggcctggcgtgctgcaattcatggggtcgcaaagagtcagacacgactgagcgactgaactgaactgaaatataggtgaccctagaagccgatttgaaacttaactagtttcaaagattgatggggtcagaaattaggttacagagtcaagggtgaaaatgaggtgagaaattaagagacagcaaatgatgactattctttccagaagattgaatataaggaaaaaatagacaaattcttgcaattaataagataccaagttggcaaagagaaaacatacatttttttgtaaagacagagaggccagaatttatgcctctaggttaagaagtggaaggaactagggaacaagaaaggttgaagatttagaggagaaagaatgtcacaaatgttcttatgtgatttcagagctccttcatctcctggcctctactttcatgtttgccagtaaattgtcaccctagcaaaattttcagtagtctgatgaaggcagccagttgtcagggtaccacagtccatgtgatcatcaatagatgtgaagaaaggaatatatgtagtaggtatacacacatgtggataagtaagtatgccaactggtatgtatgttatgtgtatgtgtacatatatatatataaaactatatatgttggtggtgactggtgctcagttgtgtccaattttttatgatcccatggatggtagcccaccaggttcatctgtccatggaattttccatgcaagaaacaactatatatgtatatattatgaatagcatatgttcatataaaaaatataaaaacacattcatttccttcctttcttcattattttttttcttatcaatactatactaaagaaagagtataagaaaattcacattaattactttcactaggaaagggatccactaaacatatccataaaagaatatttggctgaacttgggactcactaaaattctatggttctcaaatgaaagctaaactgaattgtttataatccagtttatatttctagtaaagtaaaatactaacaaggataacagaaacacttgcaagacagatgtcttcaaagatagcaaacatatctctgataatattgccataaactcagagttttatgataagaaatagattgcatttcctttttcacatagaataaacaatagcataagctgggccttctttatttagtgaaaat

SEQ ID NO: 63772 - DNA, 1742 bp, Bovine  19866880681972
  misc_feature (1)..(1): n is a, c, g, or t
ntgctgagttatatgccaagataacttttgaaaggtatagccacatgggtaattggcaactatcccaggtttgtgttagatatgttatggaagtgtttctgtaaattaggaatccatgcaaacaggtaaattttattatctaataataattctcattggaagtattcttttactttacctccctttttcatgtatttacatgaaattgcctcaaatgatgctttctcttttctcttaaagagcccatcaatagatatccaaagacagccataattaggtaagctggccaattaaataaggaaacacaatatcttgttagcaattggcatcaactgttgggtgacattttgataaactgcttcaatatagtgtatagcattttggtgccttttcacttcttaaaaggtcagtctctgtaacatcaagatagctgatatttaaagggtataggaaaattcaaataaatagtctgttctacttctatatatttcttcttgcagtaaaatccctgaaaatctacttggcttttttattattaatattgtacttattgaggtctccattattagaaggggataatgatatatcttttttttctctaattctgatttgctgtcacttgaaacctcactctatattttcaataaagaatttaacgttgactcatttgggaaaatttgtgtggttacaagtgtttcccttcctaagatagaactaaaaatatttctagaacaatacccattagtgagacttttaggaagcctcttcaaaccactgtaaagagtgtgccctgcactgctcacaggtgggaatcaaccccaccaagactctaggctggtgtttcttacaataaaaagaaagaaagtgaagttgctctgtcgtgtccgactctttgcgactccatggactgtagcccacaggctcctccgtccacgggattttccaagcaagaatactggagtgggtttccatttccttctccaggagatcttcccgacctagggactgaacccgggtcctccgcattgtaggcagacactttaccatctgagccaccagggaaatttcttacaatatgaccccacaaaccatctaccttaaaatagcatctgaaaagtgctttatcaaaaatgcagatacttgagttaaagtccagaagaactgaatcagaatcactgaaggtggagctgaaaatgcctatttttttttctttaaataagatctccaggtaattcttaaacttactttgaacaacacagctctgtgcaaatgggggacttagaactaaattctatctctcttccttcatacgtattaaacttctcacatctcatccagcagggaaaccacttctatctaacacagctttaaaacgaaaaaacaagttgcctttttctaaaatgacgcatctttgactttttatccagactgttgcaaaggctgtgtcttgcgcattgtgtactcctcatggacattttggggctgtgtataatatcattttattgggagtggataatttttcttttcaattgtcctatgtagtgtaggaaatgtcacataaacttcttttacagctttgctagaaaggtctgagagctagagcaaatacatgtctgtgcatgagcagagccctatcagggctttgctgagcatgaattggttgaatcagccagtggtcccattgttcagtccatggcccacaagagtgcaggtggcataactgctctttcaaagaagtaagg

SEQ ID NO: 63773 - DNA, 1886 bp, Bovine  19866880714156
  misc_feature (1)..(1): n is a, c, g, or t
naaaatgaaagtaaactttcgccaacaatagtgtatatttatacatctgaataatcttgtttttccaagaaagagatattttatatatcttttcattcttctgtccctaacttttgcttcctgttttaaaaacatattgctatcttagttcacagttatcccagaccctttttgaacaaaatccttctagaagaaatcctggcttcattacaattctcttttcaatctgttaaaatctatccaaatttgtgttctctaattgcataagagatttagagaaatgttcaagaatctccaggacttgtaacctcttttttccttcatttgtttctaaactgcatctgtgttgtcagacaaaatattgatagagcttgcttagctagatttagtagaatctaggagagtgatttatagagtagagggaaatccatgttaaaccttcaggtctggaaatttaagctttatattgatatctatttggattggtatttcctttccttgctataaaaataaaatgatgtgtgagtgggtaacccagaaatacaaaacataatgtttaacattacacctgccagttgcaagtcagaaggtatgttagtactttaaagattcccaaagtgaaagcatgtcaacactatataggatagagctgtgctctgagagtacgctgaaggataagaaacattgttttagactgagggggacaaagggtaagtttggaggcatatgaacttcatattagaaatagaagatgaaatgcacatctggactttaagtacatgtatatacatgtatatatgcaaacacagcatatatggcacagttatatacatgtatgcgtgtgtatgcacacacacacacaagtacacatggagtgtatgtgagtttctaaacatacacacatatactgttgttgttgtccttaggggataggctggtcaaaccagctgctgacaaacaggcagactggccttttgcctctggaaggatgtcctgaggtagaatcctgcatgtggcaggcagccagtacaatacatcactacagctggattaggaggataacacccaggccagaccaggaataaggatgaatcctttttgtagaattgtatgggggcgggggggcagggggggttgcagatcactttttttttttttttaatccaaaatcactatttccaaagccaaaactgaaggaaacagttgtcatccagaaaagggtgaaaaagaggacagtgggactcttgaactagggcgtgaacctgcatgaagtcgagactcctgccagccgttgaaagggttaggggaggaggtggctgcactgcggtacagcaagacagggttcaaaggcaaccgagagaggcctcaagagtttggatcctggattcaagtttcctggccctatttactgagcttttcctcaggaagtttattgagatttaaaaatagcttcagcgtggaattcagatttctacaagcacttgttattttcaaatatgagcaaatagccagacttccattgaatcacccttgtttcatctattgatgagtttttaattgagtcccaacaatctgcttaaatcagattatcttcctaagaatatttgaagtttattttgccagaatctactttggttactatttaaacaactttacagatcacagaaattattttaaataataagctcataacaatacaagaacattttgcttattagcataaccttttaccaaccacatctactccccatacaaaaatataagaactcagaatttgcacttggtagccatctgtttttcctctgaacattttacttttaagtctctttctttgagttgttaagatattttaaatcatgatgttcttgcacagcatgtcagataga

SEQ ID NO: 63774 - DNA, 2009 bp, Bovine  19866880797406
  misc_feature (1)..(1): n is a, c, g, or t
naggtagggaaagagtctaaggaaaaatataaagtgctctgcagatgagagaaaaaaattggtaataatctgttatgtggaatgatggagaggtagaatcaaggataatttcaaggtctttagcctggatgaatgggaaaactgtagttctggaaacagagagtaagattttgaaaagatagaaaagatatggaaaatgtgccatctttggtttgagagctattgaatattaggagtctgcaaggtctaaaggtctttaagcttgttataaattgagtattgaagtttgagtgagagatcagtgctaaaaatgaagatttggaatacatccacttggatgattatctgaaactgagagtaaacaatgctttgaagagaagcaaacttgaaaagtcataaataatgcaacatgatttattttgctcagatctattatattacaagtaggtagatgatacaaacaagttagtgaatctctcttatctgtctttaatgatccaggaatatgtgaagaatattagatgagttgagaatttcaccactgaaggattaccatcaataggctgatacgtcactgcatactgagtcatcaaagaaacataactgaatccagactataatatatactctgagtttaaaatcatgtccatgtttaaaaaaaaaatgaatctcctttcttgaaatgttttggcatcacagatagaggaaaaaatcatgctgatgaaagcatgctatagaaacagagtgatgccattagtatttgatttgtatttaataaggtctgcttttattataccactcagccataggagctctattatttcattattgagcttttgctgatattccttcagcctagctttaacccttgcttccaatggagtgggaggggagtgtttgtgtatatggacacatgatgtactttattttgctttgtaagccatccatgtccactgaaaaactatgatttttaacagtttgatcacaatagagaataattgcctaaaacccaatttcttcatttcttatatatctctattagaaaacccatccctcaagacagtataaggtaccatgaaaaggtgaatattgttttttgtaaaatcctttcatagttaaaaagaaaatttgtacaaaaatcatttttcagttcaacctttcttcactcctggcatcctgcaacaggcacacatttgtgcatagattcacactgtcccactgcatcttcttatctgaaattattaatttgatgacaaagacctcccattaatattgttctcctttggcaaaagtcaaatctcctcagaatcaccttcaaaatagcttgaccagtgactaaatttatgaatttttaaaatattgtcagtcagcattgaatgcatttacctacttaaaatgagttttgtttcaaagcactttgctgccatccatggtaattggaaagtcagtttgagatatcttctaatgtgctttttaaaattgaccaaggctgcagaaacagcttcttaaaccaaatataattaatttctatctgtcccatctgatcactgtaagatgacagtccctcatattctttatttttaatgtatgtgttttttttttttcaatagagaacattggcctttcatctctccctttccctctgcaaattggcactttctgtcttctaggagtctcattaccatccaatgattttttatgccacttcacaatgaaggcactaaactgggacacctacaagaaaacactcacacctacttatatagcacattttattttctttctctgaatcttcctccatgtggtctttatggtttcaatagttctcaagtgtcaacaagacctgaaacttttcaaccgttggctgcctacctcattcgccctccattcctcccaggcagcatcctaagtagaatagaatgttacagcacctgattggctcatggatagagcattcattctccaggaatgccctgtagataccaattgaaactgcatcatccataaaa

SEQ ID NO: 63775 - DNA, 833 bp, Bovine  19866880863597
  misc_feature (1)..(1): n is a, c, g, or t
nttatggtacagcaaagacatgttatgatagctgaatacaaactttatgagagccagaatgcattgtatttcttactctgttactgattttgtatctctagtaactaaaatgatgcctggtgccagaggtggatttgccacaaatgaaaagactgtgcttggggcttgaggggaattgaaatgtttaagggaaaaccttttcccttgaggcttggagttttttgaatgtatttggtatttagaagagcatttgtaaacttggtgacaaaagttgcattagaatattcaggactaaagccagattgcaagggactgagaaggcatacacactgtagaagtcagtcgaatgtatggcatgttcttcgaagaagtttaatgaaaggaacaagagtgagggaactaatctggggggagtcaagtttaaaaggccattgtcttcttaccatttttctcagtcaggaaattgaatccattattggtaaccaagggcagataatattagtaaggaatatagtatatagtaaaaaacacaatgagggtagaagccagttagagggagaagaaaaaagattataataagatgactgatatataattctaattttttgaaaattgaaattaatttcctttttaaatatgcctatttacatcctatgagatattccatgatggctttccttagacttcttatctaattttcattaaacttattgtttattatgattcaaaacacttgtccaagaaaacgaatatacttttaaacagaattttattaaaaaataataaatgatgataaaagtaatgaatgtcgcttagagaaaatttagaaaata

SEQ ID NO: 63776 - DNA, 1441 bp, Bovine  19866881022564
  misc_feature (1)..(1): n is a, c, g, or t
natgtatactagggttggagggttgttgttttaaaaatattttcggtatgacaagttgaaaattttagctcgtaagctaagattacctcaaaataaatatgttaagtaaatccacaagatacaaatgcaaggattcttggcatacaagaaagttaaaatataattttttcacaaggaattgacataattcataagattctttacattctcaccatttattttgagaatgtccaatttgtgcatttttcatcaacttatactgttaagtataaagtgtttcccccaaaaaaggattcctgaaagattcttgaaattgccttctgcggtttccttcctcactggagctaactataaaatccttacactgtgtaactaaaatgctagattctttccataattcatattgatttttgcataaaaggcctattctgagctcagaactacataatcaaacacaaccatcagtttctgatgctaaacaaaattatccctttgggggaatttattcacaccttctctggagataaaggggaaaataatcttctcacttcctgaaacattatagctttacattagataaaatagacacctctatctggagtcaatttccatgtcaggtaaatcaaatagtcatagctccacagtaaagaactaaatttcatctgtaagtcaaatttctagacagttcctgaggcttttaaaccttcaaatacccagagaaggaggtggtcatgaaggagcttatgaaaagtgacatttttcccagggaatttttatctcctattagccagatgctgtctccttcatgtcagttcctccctaaaacaaatcaagactgccaaattaatcttgggcagaatttctctttgtagaaggtgtaatcctaaaaccctatcacttcctctctttctcatcgtgttgctttggggagcaatacacaagctcatgtcctcccagcccccttgctctgcccccacctccctggagacacctacattgcctttccccctcttcttggtacaccatgaacagctttaacacttgctgttgtcccctcttcctgaaagttttgtccttgtacattcaaattggggttttgtcacactgtcaaagtttcagctcagctgtccctgtcctagggacaccttctctgaccacacatcaaaagtggcttcatcaggaatttcatgtcttatccctttggtttcattgacttcgaaatagtcatcatgatctgaaactcatttgcctgtttccttgtttattacctggtttccccatttcccactggaatagaagcccctatgagaacagggtttttacttgtcctctgtcgtcttctgggcttccctggtggctcagcagtaaagaacctgcctgcatgagaggcaagagacatgggttcgattcctgcattggaaagatcccctggaggaggaat

SEQ ID NO: 63777 - DNA, 717 bp, Bovine  19866881031554
  misc_feature (1)..(1): n is a, c, g, or t
ncaatgtgctccatatgtgggcaaagaaattctctaatgttccttgttccttgacaattgttggaaaagatccatttacatttattctatacatccttcatcccacactcccaacctagggcaggaagttttgggctattatgcagttcagcagaaaggaagaccctacacagcctcagaagggcctgcctgggagataatagaacagagaaagagagggtatccctagagcaaataacagtaaaaacagtgcctcttcagatgtctcttgtccacatatatctagagcccaggttctgattctctaagggcaaggtcttctagcaatgtgagtaaagagagggtaatgtgcatttctgtgaaaccttagaatgagagtttctgcttgtattactgcagtaaaggtccctcagagcccttcttgtaaaatcaaggaagttgttctgggatctgtagctatactccttgagcctgcctcccatgcagaaacaacactgcttcagtaagaagtcaatgaatattttccataagctttctcctttgccaagagcgttaagactgaaggcaaaaaagtaaacttataggagcaaatggggaggtgagcagtaaatacatgataaggctatgcggtttgtaggtgaagacaaattgttttgaagactataaagactttcttggtccacatgcaatatccagaacacctgcaacaacagctta

SEQ ID NO: 63778 - DNA, 2700 bp, Bovine  19866881034159
  misc_feature (1)..(1): n is a, c, g, or t
nacactgatagttgggccaattgtgacagacactactaattttcttccagtgtccatttgccccttttcattttagttatagaacctccccatcatccctgggtctcagcatggcgtgtagcaagtcagctagacaccatatttccaagtctgccttaaggtaacatgtaacttaatgactatgtgcttgtagtaggtttgtcaagaaacggtcttttgaggtttcgaccttaaacactgccttaatgcattctttctttctcctgactaggagatagcaagagcaggataagctgccttgggtcagctgaggatgacagggtgaatccagcagcctgagcactacatttcctgtggagaaagggaagcttccagctctggactgtttagctctgagttgtaacgcaaaagagcaatagatttctagttcgtttgttccactcaactgctgagtctctttattacagcattctgatctgtatttgaaccaatatactagggttgaaagagaaaggggatattctacatgtattttatcatatataagaaagtgcagtaaattagtgaactcaatcagctttctttgatattttggaagtaggcttaaggaacaataattccacaattacatcttggaaatggtagtaaaagataactggataccttttaacatgaagacaaataaagcttgcaaaaaattgaaccactacctcaagatgaaaaatgaaactatataaaactgtatatgtaagaattttgtgggccataaagtattagctacataataattgttaatgattaataatttaaattatttttactgatataatcattattacttgtgttctagccagttcagagacctaaacagaacatatttctactagcatttaaactatactttaaaaatatcataaagtggtatgtttcaatcattgcattcattcattcattcagcatatatttgtggaccacaaatataacagaccaccactgtaacagtgaccctacaaaaactcaagtttcatatatgtttgaattcagataaatactcacacaacatcctaaaatgtttctaatgagaaaatttccagttgcatatttgatttgtgtttatgaatatagaatatatgcgtatagaaaactatacaggacaaatgaggacaaggctcaaacgagttggttagtggaattattattttttaattgtaaggaaacagtaacaaagtgaatgactggtttaaagaagaattgaatgagataagggtattcctatggaattgcataagataggaaactcacgttttttcctacttaaaatttgtgggaagcattttttaatgttgcatacctctttgtatgtgtggttacataatgcccttgattctgttgaagataactggttaagcctgtgaaatgttcattgatctaaatggatgggtctgaggggaagggcttgtcagcggagacagcttatcagaagagggttgttcttccaccccccttatttatccctaaaccaggggaaattcccctgggagcatagaggcctcagcgggaacattgcagagactcaagagagaagaaatggtttgtaaacgaacatttaaaacaagaaaacacttctgtttttaaagccaatgagtataaagtaccagtgggagacgtgagttgacagctgggactctgcatccgtctggccgagggattctgagtcaatctctgacagacgaaaagtgggacttggagaactcgggactgtcagaacctactcaaaattcctgggcttgccatttcaaaccaaattcaaaccttccagagcttgagattaaagagagtgcttacagaaaaaataaaagaggtttgaaaacgcttattaagaggcatcttagaaatctttataaagcatcatctgtgatgatttacatgcaaatgaatacgaatgtgcttggcatacattatgtagggttttcagacttgatcaaatccagactgatcatacagaaagaaaggcacagactagagccactagagagactgaaggaaggatggcctgcccgctcctggtttgcagcagaggagacatgagagagaacacactcttattcagtcacttaaggacaactattgctcccaggctacagtctgagaccagagataactcaggaggtttctgggagcctgagatgccctcagagctgcacgtgtgcatcgaagaagccttgagcacgaatttaccccttactccaaagtgccagaggctgtagcctctttccagggtttcttgggggcctcattacttccatcatgagtttccaggcttcccaggtgtctgaagtgacctctctcggtgacaggacaggaaccaggatgctaggcctttgctaatcagtctgaattattaaagaagtttcccaggttcagaaagttgctacagagtgtaagatgtagataaaatgtaaaaagggaccaaaaaatgccaccaggtcctcaaactgccataagcaggaaagtctgacagggttatataacaagctaaaataggtctcttgaaaaactaatggaacttctgagttcttatttaatgctgctgctgctgctgttgataagtcgcttcagtcgtgtccgactctgtgcgaccccatagacggcagcccaccaggctcccctatccctgggattctccaggcaagaacactg

SEQ ID NO: 63779 - DNA, 2923 bp, Bovine  19866881056568
  misc_feature (1)..(1): n is a, c, g, or t
ncttgactgcagatgaattaggaattggtatatttggctgcttggtcagtttcttgatcctgtgagaaaaggccttaaattgaatggactttttagggaagaaggactttttttttcccttattattctcaagaatgacacattttaatttagtccttgatacaagacagtagcacgaggaacgtgtctatcatttatagtcacagcttcctttccttgacttatcaaagtagctaataaggtactttgaattttttgtgtgttcaaatggtttactggaataacagaaaagaaaaaagatagctgcaagacattgcagatgatgctgtgttggcataatagcgtttacatttatggaaagcaaagatagtttcactaaattaatatttgcaaaaccaattcagttcctaatttttctttttaagtggattgggaaaccttctataatataatgtaaaataattacatactcagttactaatcctaatagagtctttcagtgttcatacgattaccatctcctctttaaaataatctcttttcggtgatcccctaacgcagcatttgatgagttcttttcatcactattttttttggatgtttaaaagttggcctccagatagagaaatgggctgatgatatgaacaggcatttcatagagaaagaaattgaagtagccagtgtcaatctcagtaatcccaaactacagctatcacttgggtgtgtgagtgttctaagttgcttcagtggtgtcagactctttgtgaccctctggctgtagcctgccagccttctcttccataggattatcccagcatgaatgttgaaatgggttgccatgccctcctctaggggatcttcccaacccggggatcaaacccgtgtctcttatgtctcttgcattggcaagtgggttctttaccattgtctccacctgggaagcccatccatcatttgggcaggattaagaaatgatattggttttggagaagtgagtactgttatgtgctgcatgtagtcctataagttggttcagcctttttgaaggtaatttggcagaactcatcagaaaacaaaaaatacagcatctctttatccagcccttccacttttgaggatatattaagttgactcaaagatttagaaatgactggcaaactaaattatgatttatccacacaatggaataatgtatagatcaaaaattaagttgcacaaatacgtttatatgtattatgaagagaaagaaatggattaccaaatactctttttggtataattacattttttagaagtatttgtacaaatacatgcatagaaaaagatctgaaagataaattttaagtctgtggaaagtattaagagcatttatataatttttgctcatttgaatttttgattctttcctctaatgagtatgtattgcttttgaagcttttttgttgaagatgtagcctctatcttaaaatgcacagaatagtgtaggagcgaaggatacctgataatcaacaggatgtccccattccccaggtcctattctgaaggttcaccaggagcctgttttcttttacagctggttcttgaaagctatgtgtgagggttttgttttttttttttttccttctgtgacaaatgcctatcattttctaaacaagaaagccaatgtcccggttaggtgtgtggagttcttttcattcatttgcagcgctgttgtgttaatactaaataggcagagacagcctaactggtggtgtaggatggtgagccagtcctggggctttttctggtcagcccagaatcctctgattgccacgttttcctaatttcccatttccaaggcattacttgaatgacctttcttgctgaatatgatgctctgaatctccaagattttcacatgcatttggaagtgggcagccaggcgattgtttacaggactcccaatgaactgtgtgctcacagcaagtttgataaacacacatttcctccttttatcagtgagattgcagaatgtgaagtatgagtttccagttttactcattcccctcagcccttttcctgtttaaaaacttagacatactaattggatactgatctgtccctgttttttattttgcttactggtagttgacggcttattccactacttacctaggcaaggcttggcagtccttcaaaaataaactttccatgtatacaagttaaaggagattcatcccaaggaatgtaatgtgagcactaattaacagtaatgactgctaatcactttgctttttatactcctttagaagcactgctattatccaatgtagttaagtaaaatgcttgtatatgaatcaacaatgctgcatccttttagcagctattgctcacaatcaagctttgcataaattcaagttaaacaaaattgattttaatatgctacatttctttttataataggaaactaaaatatctacttaaatatccttaatactaaagacaatacctgttttccttttttacaatcatccttgtggtagtcggaaagcaatatcccaatttttctcacagttcacgacatttcttagatttctttgacattgcatgtggtatactcttcatagtcacagctccactttgattgtattgaatgcattttatcagatcagtgaaaagccatgggcttgtatttaatttttctggttttgtacatttacttcctagagatcgtacagtttcttaaaattatatggcccatttgtataaacttagttcataggattgtacattcagtgttgattaaaaaaggttgttttattatgtttagtgtattattagactattatagaagctttctgtttatttacatgcactcagcatacctataaactgccttgcctcaggaagagactaagcaaaactcataaattaataatttaag

SEQ ID NO: 63780 - DNA, 1722 bp, Bovine  19866881239036
  misc_feature (1)..(1): n is a, c, g, or t
naaatgccaaatttagtgatagaatttaagataactgattaacaattgagtttttcaaaacaactcctcctcaataatattcttgttggactagatgcaacttaacatcataattggaaggaaaattattttgaactttataataaaaaacaataattgattttaagaaactctattatagaaaccattcagatcatatagtgtgtgtgtgctaagttacttcagtcctgtccaactctttgcgaccctatgggctgtagtctgccaggttcctctgtccatgggattctccagacaagaaactggcgtggattatcagtgccctcctccagaggatcttcccaacctagggactgaacccacaactctattgtctaacctgcattggcaggtgggttctttatcactagagccacttgggaagcccagattatatagtacaaagctacaactgactatgcttgcttgcttgcttagtcgcttcagttgtgcccaacattttgtgaacctatggtccatagcccaccaggttcctctgtggggattctctaggtaagaatgctggaatgggttgccatgcgttccttcaggggatcttcctgacccagggattgaatatgcatctcctgcatcttctgcattgcatgcagattcttcaccactaagccaccaaggaaacctatgactgactataagaacctcttgaagcttacttgccataatgtcataattcatagaaataattaattatgtttaataaaaaacattttcttttcaaggtgaaaataatagtatgtaggtaacaaagtccccaaatttgagatctatcccaaggttctcccagtcacattccttacattggcttccatataccctgtatagtaataatttgtattctcccttcattgtgcttatctagtgtttaatacttcaagttgttttttatacataaaagcctttggaaaataaataattacttttatttgatactttggaagtccttggagaaggaaatggccacccattccagtattcttgcctggaaaattccatggacagaggagtctggcgggctctagtccatggagtcacaaagagtcagtcacaacagagtgactgagcactggaagtccttctgtgaattatatcctcactacttcactcatttctagacatttcagatcatattggtatatagacacactactcacagctttatagaataagctatttcaagattgtgtcctctagatacaagctccttgggagaggtctgtgttttatttgtctttgtttctctctgccatgtatagtaccttgttcatgtcagctgtttcttaaatgttgaataaatgaacaaattaatgaataaagactaggtctactctgtttttcctaatctgtcttagctcttcctgcttagtcaaattcaatttcattttcccataaatatctgtttctagttctaacaacaatctataccttaagttagaaccagagagaagagaagtgtctgaaagttaggacctgatctttctctaagaacttcttctgtttctttgcctgagtaaattgatgccaacaaaaaataaatatgcagtagggtcagggttaagggtccttttgtatgattttagtaaaaacatatttttatagaaaagtatctgcaatagcctccctagagttggtcaaatcaccccagaattggtttccaagacagtt

SEQ ID NO: 63781 - DNA, 1701 bp, Bovine  19866881249069
  misc_feature (1)..(1): n is a, c, g, or t
ntgaaagtttgttcatgggacaaagttccatgttacagaaaaacttcacatgaactgtttggtcaacccaataaaattatgcacaccttgatcaagtctccctgactgtcttaatgactttatgaagtccaatcaatttctcttgcctcaaaacagatggcagaagtctgtggaatgctggttaccctcagctgatggcaaaatcaaggttgagctgccagatggagcttggcactgtttaaaggaacaaatagcccaaagttcctctctgccacagaacctagtctttgcgcttcctttcacatttttttttcaacatctattgtattcttaaaaatagaaacacatgtttctgccagtccctccatgggatcccagatgaaaaacctctaaaggagaaaaacaaaatgcaatttgaatcaaagtctgtgaagcttcccagacacaccaagccagggccattgggacgcagcgggtaagatgctgacagcccaccaacaatgagaccacaggatctgcagctagaaggacttctgcagtcatcctctacttaccagacttctccctcctcttccccatgcttgcatttgccctaattgaaaagatccttcggcgatggcttcagtagagcagaattgctgttccttactcaaaacttaaccctatctttccccatggctttggctctggattctcattctactttgggcagtcaaagtgttagtcgctcagttgtgtctgacgtggcaaccccatggactgtggcctggtaggctcctctgtccatggaattttccaggcaataatactgccattcccttatccaggggatcttctggacccagggattgaacccatgtctcctgcattacaagcagattctttaccatctgagccaccagggaacgagtgaaatccacttgactagaagtaaagatactatgaaaaattatgaagcgttctctcttctttgatgctaggtttcctccctgtacctttatgttcccagtttcttaaaagctgctcccaggggagaaactaatactctctattacatttattgtttgcctctttcagagctcagagtttaacagccaggcagagggtgcagcttacatggtggtatttcaaacatcagtaaaatggtgaaggttattttgcagcactcctgataccatacttcgtgaactttcctgatggaaagttgatgcaaactggattttcatagcaattcaccttgactatattcagatttagcaagaggttctgctgatggaggttggtcattagttgtgatattgtttaccactgtgtgttaacataaactaaaatcctactcacttaatgacatttaagccctcaataacctaatcctgtgctattttcccactactccttgtgattcagccaacctctcaattgtttattttccttgcttgtttcaggtttgcagtcttcatgccctccctcaaaattagagtcagcctggcataagggcaagagcactcaactcagatggggctgagtgcggaacatggcttaaacaaattaagtgatttatgcaatatgatagctatatgactttgagcctttagcttaatcatctgtaaaatgacacttccaactgtgcaatgttcttaaaagggtaatgtaggatgtagaggactatatacagatagggcactcaataagttatctttt

SEQ ID NO: 63782 - DNA, 1112 bp, Bovine  19866881273284
  misc_feature (1)..(1): n is a, c, g, or t
ntgttctcctgttggcaggcagatttgagtattgcacagtaattgctgggctttccccccctctctccccatctcaatcccggctaggagacagcaactacacattgcaagtaattgtcatatgaaagaccaaaaactgctaacaagacagagtgggtagatgtgcaatcctggtgatgccaagacctaatgaccacagcagtgatattttttgattggcaaaataaagtgttaaatcttcttttttcccctttagacagttaattagggagatccctgaacttttcagaacactgaagcattgcctgtaggaaagttcagctttgcagtccaagggtctagtttgggtgattaatgctgtcgatgcatttttagtgagtttgagaagtgtattgtgtcataagtagtggtgagtgggaagaataaggcaatgagcatattattttgagcaagtgatacaatttgacactcctccctagacattaaaggcattcaaaaaccaaagttattaatctagttaatcaataaaatatcaaaatatgaatgaatttctagtgttcccaggtggattggtcgggataaagtccggccttggtaatggctgacagttttctttttggctcagagcttccagcaggcaacatatatccatgtatttgttggattatctagctaactggaggagagcaccaacaaggatgatccaggatcatgtgtgtatttgacatcacatatgtcctcaatcataaggatttgtctggtgttctgggaattcataacagtttgaatctgagttccaaacttgtaagcattaaattgctcaaagggctcataactccatatctttcgtagcttagacagcaaggactgcttatgtggtatttacacaaatgaaagattaaccctgagactgctggctgagattgcttcttttcttctgactccttttagcttttacactttctccattcagacttgtatcttataaagagctatcaaaaagagatcttctatgagcttactgcaggtttaaactggttgcactaaaatttttgtatagtgtattttggaggttcctgataatgatgcctatggaattagaagaatccaag

SEQ ID NO: 63783 - DNA, 760 bp, Bovine  19866881294122
  misc_feature (1)..(1): n is a, c, g, or t
ntatatatacacacacacatatatatatatacacacacacatatatatatatatacacacatatatatgtatatacacatatatatatatacacacacacatatatatatatatatatacacacatatatatgtatatacacatatatatattcaaacaatcagtcacacaatctatatatattatggaaaaacacaaatttgagataaaattttcttttttcttcccttgtcaaacccatcttccttttgccacatgttgctcatcttgaagcagtcctttctgatgcccctttacccagagcccagtatgagggatctgtacacaacagtaatcaaagtgtaccatccaggagacagataaccctttccgagaaaagctctattttcatccttcattgcctctccccctgctcttgttctgatacttttggagattagagattttaactgtatgacttgtgaaatgccatttttcttccaacagctgtgtttatgatatataatctattagctgcccatatgccagcatttaaaagcattctgatggataatactcagcaagggattaatcttttccagcatcaccctcttgacctgcaaatgtacattagtggggggtataatgcctgctctgacatttgtttgcaatgtatccaaatacattctggaatgcacattcaggtttcctggcattgagacagacaggcgagtcagcactaagacatatagttcccatatgccagggttaagggaactag

SEQ ID NO: 63784 - DNA, 1414 bp, Bovine  19866881296034
  misc_feature (1)..(1): n is a, c, g, or t
ntatgcaagatgttactattaagagaaactggctaaagggtattgggacctctctgcattatttcttagaagtgcatgtgactctataattacctcaaaaataaaaacagaaaaattattactatcattatgagtccactactagagtctgtattaccatttctgcagacattaggcagaattatatcaagtgactgactggatcacatcagaaagtgttgggaactcgactgaaatgaatgatttattgtgaatcctgaaggtgatgccaagattagaagcttgagtaaccagttcagttggaggacacgatcaagaggtagcattcatgtcataggtccaggttgagcagaagggcactggcttgagcttgactgtaggctaggctttctggaagcagatgatgagatggaatttagggtgtttattgaggagtgacaaatatgaaagcaaggtgaaggactgaatagacttgaactctggagggagtatttcttttcagagtcatcctgagttgtaccctatggctttactcagtcatcaaatatagacaaccctcagtgggcatgacctcaggtgaacttgctctctgtaactgaggcagatcctcaaaaaaacctggcagcttcagggtctctgctaactgcattccccacagctgggcaagttaatcctgcctggaaggaggttcaggcagtatatctctgtgttgacacagttggcatacatagacatacatagtcagtgactgagctaatattgaattcaagtaaatagtcaaaaaaatggaatttggagagtgagactgggaacacacatgcagttcttcttaacaacacgattggatgtaacaggatggatgcgggaaggcactggcttctcccttcaatttgaaaaaaaaaaatgcagggaatgtggcatagactttggtcttttaagtcttgccttttaaaaaaatatcccattctagatagggtttgctgttgctggattactaagcaatacagttgaagtgatgcaagggcttttattattagactgtatctttaggcttttcagaaaaaagttttaacccaaccacttcttaacttaaggagtgacttgctacctattcgttagttgcataaaatattgccagagttttactcactgaacttatttcatcctccattttagcaatgtgatattttacaaatatgagaagctgctatttatcatccacttagaactcttacagtgcattcataagaagatggttagaattggcatgtaacacaggaaaactcttcaaaggagactcttaacatttccttatacccgctgaatgaaacctggaaaaaaagctattgttacatttcttatggagtttcccaacgcctcttatgaatgagccatatttagtttaaacaaattt

SEQ ID NO: 63785 - DNA, 908 bp, Bovine  19866881311043
  misc_feature (1)..(1): n is a, c, g, or t
nagtggatataccttatttgtgggttttgaattaattatatcaaccataaacacagatgaaacaactttgcttgtctgccagaaaacaattcttgattatgagatttcaggtcttctaatttgttttcacttaaagtaataaaaggtgcttgctgatcattaactggagaaagctataaagtcagtgaatctggaaactaacatttatgacacacagaaggccaagaggcataggaaaagatgctcaacatcattaattatgagggaaatgcacatcgaaactataatgaggtatcacctcacaccagtcagaatggccattgtagaaattaaaaattctacaaacaataaatggtggagagagtataaagaaaaggaaaccctcctacactattgatgggaatatacattggtacagccactatacattctttaaaaaactaaaactagatctaccacatgatccagcaagcccactcctgagcatatatctggaggaatccaatattctgaaagatacaggcatcccaatgttcactgcagcactatttataatagtcaagacataggagcaacctaatgtccaataacagaggaatggataaagcagatgtggtacatgtaaggaatggaatactgcatgcatgctcagtcatgtccaatactcttgcaaccccaaagatcgcagcccgccaggcctctatccatgaaattttccaggcaagaatactgcaatgggttggcattttctacttcagggaatcttcccaatccaaggattggaccccgtgtctcctgcatctctcactgacccacctgggaagccccacaatggaatattacttcaggtcattaaaaggaatgaaacaataccatttgcagcaacatgggatagattatcatactaa

SEQ ID NO: 63786 - DNA, 1371 bp, Bovine  19866881385100
  misc_feature (1)..(1): n is a, c, g, or t
naaatgagctttgcattaaacaaaatctaaacttaagtaagcaggagcaactatggctaaacacgagaaggctgttgtcaagttcagtgcaaatttcacatcttggtattttctactttgccaatcaagctgtttcttatttcctatgcacctgaactgtttgctgaataggagatggcaaataatggaactgatagtaactttccagtgagtaagaacagtcccttctatctgagaggaagaatgtgaggtctgcaaaagccaagtgatctaaagcacccaagaggaaaaacgcccaaagtgactccagcaccttgggtctcctccccaaacaagccctgtgctgctatcaggtttgataagcaggctttcctcacccatgaggctataacatgataatgtcattcaataaccctcacaccctttcctgctatttgtccagcacaggaaactgaggattttcttgtcgtgtggacacagcggaaatatctagccagcaaatactgacccttgcatgcaaacagacccatatcctctttccgcctgacaacttccttcctgcatactaagaacaatctacccttcatttttttttttttttttttccggactttatactgactattctgaaagcccttgggaagaagacccatgtaaacttccactctacagctggattctcaaataggctgccatagttgaaggcactaaagatgccctccaaatatggtgatactgtattaggaatggtttctatgtactgtttgtgttttcacaattacttgaagaatttgacctgtatggacaactctactagatatttcagactctaatataaaatatttaaaattatattaaaggccagaaatttctcttctctatttatactaaagaactgaacctgatatcattttatgttcttcaaatccaggaatttaagacatagcccatttaaacctagagaggcagagaatattatagctgcacatccagcttagcagctaaattcgtgttgctcactcaagcaccttaggattattagagagaattcaaaatcactgttcttccagctgggctttcctcgtggcttagagggtaaagaaataccctgcaatgcaggtttgatccctgagtcaggaagattccctggaggagggaatgactacacactccggtattcttgcctggagaatctcatggacagaggaatctaggggctacagtctacagggtcacaaagaggcagacatgactgagcaactaacgataagcgcgagtctttgggctaggcagtaagactgctgaggtgagttattctgctgtttcatcacacctcacacctcaagcacgcacactgtggtttttcaaatt

SEQ ID NO: 63787 - DNA, 1575 bp, Bovine  19866881629443
  misc_feature (1)..(1): n is a, c, g, or t
ncatcaatgtgtgtgttagtggtctgataacaagacagaatgtaaagaaatataagaaaagacaacttggaacatattcccacctggggccatttaatactggagcaagcagctacttgaaattcaaaccccacagtactatgtggatcattaatatattatagaaaactataattagatccataatgattaccttgtataaacaggataggatgtcacaaaaattatgttcagtatattctttaatagaaggcaaaaatttctaatatatttaaagaaatatttccatacaaaatgcttcatagttttgcttagctttaatatttaaaggaccaacattaacataaccagaatactcatttgtaaaaattcatgcatgcattccctgaaggctgtacactgttgtggtactattaagtataattgtttttgaagaataatactggtatgtctgaactagttggtgccctgaacagctccctctccacccacaaaaaaggccaagggctttctagaaccacaattccaatacaagttccaaaaaaatgtttctgagccccatttcctaccacccttccaaatccactagctctggcttggtgtccctagtcactaccctgttgctttgttcctgctttgtgaatcaattgcttaatttgttcccaagtctggctttagcttgggatataattcagatctcccatagctccataccccagagaagcactaagagaaatacaatgtgaagtacaaatgaaattcccaatttccagtaactacatttaaagagtaaaatgaaatagagacaatttactttgaaatacattgtacttagcccaatatattgaagacaattgtcattaaaatgttgggtttttttacatttttttcaatactcagttggaaatattgtgtgtactttacacttatatctcattccaagttcagtggctacatgtgactactgtctaccatattgaaccatactgctatacagcacataggtcaaaatcactctcaattcccagaaccctgcccttggctggagtttcagattccctaatggtctctgagggcagatcctattgtatgccacattattggctagaggtttctttgtatgcattggtaggtacttaataataataatattttaaacaatcttgccttttgtaagtttcatactaaaatacttctaaatccttttttccttccagttggcattcatatcagctatgtaaacagttgataaagcaggcaccaatatccccatttgatagataaggaaactgagacttggagaaacttagagatttatttaaggttgcctaacaaagataacaattcaagggaaactttgtgatttctagtttatagctgtttgcataattcccattacttcttaaaacaattagagaatgaatctatttactgattcttggatgcaaattcccaaatggtcagcagtagccaaattctctctcttaagcaacgaatgatatcaaatatatattgaaacatgcaaagtcaacccagagaaatcaaggataatagaagaaagtctgtgtgaaatat

SEQ ID NO: 63788 - DNA, 730 bp, Bovine  19866881691508
  misc_feature (1)..(1): n is a, c, g, or t
natgaatggtactggagacggccctgatattaacttccaatgaggttctgtgacaatgaaaggtacataagtatccctccctagcatcttctctataattaatgcccttggccttgcttaggagctgatgccattcaaaaattagaaaaattatttttgggaaaaattcttatgatgctatcaatggcacattatagtttattttttcacacaactcatctttcacatgatgcgaacagaagttagggttttcagattcttaagacaatgtttcaaagaaccatagataacatcacattaaatttttttagtcactattgttttcctcaaaataatttttgaaagccaactcagtagaaacaaagccccaaacctaaataacatcaagggacaaactacacatctcacatcatggaaggaagaaatgtaatataatcatattttcatttaatataaacatagtcaataaatgtaacaattccctaaatcatactgatacgctgtttatataaaataatgggaattcttttctcttttttctcttcttttttaataatgaaattctaattagctttctgtttagatcttgatttgtagcatctgtatttttgtattattctttaaaacatacatatatgaatgctgcacattatggaaagttactaatactcgcagaaaatggaatacaggggagtggaaacaacatgaatggcgaacctaataagaggat

SEQ ID NO: 63789 - DNA, 930 bp, Bovine  19866881841751
  misc_feature (1)..(1): n is a, c, g, or t
ntaaatatagttaatgacattgatatttattgattgaattattaaatggtttttcaaaaagatcaggacaataattcaaaatgtttcagaaaggattcctaaagcatctaaacacaatcacatagataatttattttcggagttactgccaaagagttctatctgctgaaaatcctttctctctccaaatacttgtcttgtataaatcttctctacagaagatcagttaaacttgtcacttctgagttaaagttgtcactattatagatacagaaaggagattttgagtgaagaaatctggagtgatggagccaatggagagatgggacttccaattacttgttttatgttttaccagggttagctagcaatcacatgataatcagcaggaattctgtgcttccttctcaaatctacttatgagtacttattaactcacaggcaattaaagggcctaagggcacaactctctgtcttgtcagtaaaatgcagaggtattgcctaacactaaataatatggaaactactattttgaatctattcttgaattagaagacaatagtacaatttcaaatcaatcaattcttcagggctaaagataaaaatactatttagagttgacggagaaggaggagaaagtcttttattattcctgtttatgaacttttgaaagttagaaaaatctcatggaaacctagtctttgggatgcttttgaatttaagtcaaaatattattctagtggagctatttatctatatttgaacaaaaactgtccattttttttcttatggattttacttgagatgtgcatcatagatatatttttaaattaatcaatttgacatagtagtttaaaatacaacatgtcccttaagacctaacatctttgaaagtgggaagcttgaggttgaaatagcttaaggcagagt

SEQ ID NO: 63790 - DNA, 1487 bp, Bovine  19866881970761
  misc_feature (1)..(1): n is a, c, g, or t
ncttagatgtatttttttgtttgattggctcatttagtatcatgaagaattaaagaaagggcttatatatatttagatggagcagaactcatttgttcattaatttccagagttcaccttattttattgtcacatttattcacttcatatatttgtctttaacctgcctcgttcttgaacacgtttgagctttcatctgatttgaaagatttcttcaattgtgagattttaggcttctctttctcaatataaattctcctctctgtttgcacagttcagcgtctttatttatccattatggttttcttcacctgccttggagcacctagtgtagtatgagaccactggtgttgtaactgaagctccaaattgggcagacttatccactttgttttgggcagtacagcttaagcacggaggtgcagagacaaagctgaggactcttctgtaaggactattcataaaaggaagaagaacagagtagatctaggcatgcccagtgaccctttccaaattaaattgtaagataaagcactctgcctccccaggcgtagggtgaaaactagaattgcacttcttgggttcccttcataggaaggaaacacaaggaatgggaaaaatatattttccattaacattggtgtcttttgttaattattttatatgtataggtttggcttcccctaaagatgagatgtttgagagcaagcactaacatattatttctttgtttaactcaaagtacccaggactgagtcaagacttcatacatactaaatactattactttagataaataataatcagtgagaaatctagaaactcaagttatagtcctagctctgccactatgagatcttaatgtctccaggccgtgttttcttatctgtgaaatgggaggatttaaaaaagaatattatccaggaggaaatcataggacaaaacccccaaatacggttgaaatagatggcatgaatcagttggttacaagaatctattcagaagttaaaatagaataaaattattctagtagttattcactgatcttgcagaactgacttgccagtcagtgaaagagcttgaatatctacacaagcatctgataatgatatcagggtcttttctgtacaattacttcccatttgcaagtgcctggagctccacttatttttgtacagagtcgtacactccttgcttatctttttccatcttattttatctttaaaatactgatgttcttgatcttagcaaagtgtcctagaggagaaggatctggtaacctaatctacacataggtgagaggttcctattgtgtatctgttcataccagaattgtaggaaagtgttacactctaggtagggagatattctggggcatggagtttttttccagcatctctcataccatattacataggcatctgttaagtctatgcacacttgtaaagccagctcagcctgtgtttgggagagatgattgtgcatgt

SEQ ID NO: 63791 - DNA, 3964 bp, Bovine  19866880342182
  misc_feature (1)..(1): n is a, c, g, or t
nctagcatcagggtcttttccatgagtcactcttcacatgaggtggccaaagtactggagtttctgctttagcatcattccttccaaagaaatcccagggctgatcttcagaatgggctggttggatctccttgcagtccaggggactctcaagagtcttctccaacaccacagttcaaaagcatcaattcttcggtgctcagctttcttcacagtccaactctcacatccatacatgaccacaggaaaaaccatagccttgactagatggatctttgtataattgtattttaaaattattttttattatgaacaagcatataacaagcataacaagcataactgcaaaaaaagtattatattgacattgatgaaaatacttttgtgtgctgatccagtaaaagacacagtacttaacatattatttcgatgggaaaatgatgtctgaagtccaagcaaaatttagggtttattaattggagactgttattatttaattagttttaagtacttataagtcttaagtgatagtcactcagtcatgtctgactctttgtgaccccacggactgtagcctgccaggcttctctgtctatggaattctccaggcaagaatactggagggggttgtcattcccttctctaggagaacttcctgactcatgggttgaacccaggtctcctgcatttcaggcagattctttaccatctgagtcaccagggaagtgctatacataattgttctattggctgacttcgtatcttgttttattgcaatttttccctgatacattcttaaaagcaaaaggtaactaagcaaaattaaatttccctgtggaacagatgacagatttgtcatcatccttggatcttcctttcacatgaaatatattataatggtggaaacgattagcatattaatagtctaatattaggggctacccaggtggctctagtgataaagaactcatctgccaatgcaggagatataggagacaccagttcaatccctgggttgggaagattccctggaggagggcatggtgacccacttcagtattcttgcctggagaatcccatggactgagaagcctggtgggctatgtccacagggtctcaaagagtcagacatgactgaagtgacttagcaagaaaacaagtctaatattagtatcatctgacttcatttcttgtttacaaatatattaaaaaaatgagtttctaaattcctttaaaattcagctgtagggaaagaattaggaccatagctcataattacttattatgcgagattatgaaatcagaggttactagtatgtcttgccttaagggatggataaatacagacatgccatggcagactgcatacaaggctgaaagaaactcttcagttctactgggagaagagtaggaggaaacaacgctgacctttcatttcctgtaggttgcttgtaatttatgagattctttttttaaaacagcttcaaatatctttaaaccttacatatactagttaaacttcaataatgaaagctgagatcataaacatcaaaaactccatttagatgtagggtggatttttctaatgtaacctagagggagagcctctcagaagaaggagtttcatgttttgatttttaactgctaatttaaaaattggctgctagagaaaagggtgtgagtttgttttagttttggtctccatttcctgtgtaagtactttgggatggatgttaagttgagatatgaagccactggaaaaaaacaggtaaagagaaaacactatcatgaaaaattaaacactaattttccacatagttttttggaaaggaaaatcagtttggcaaggtgaaaaaggtctttggcaaaatagacggcttgagacctccctgatatataggctccctgataaaagagtccagtctatggacagatccccgctaaagaccagcaggccatgatccaacaaatgcctctttaccccacaggctgaagtctgcaagaaacagatgaatgtttagggcttttacagagttaactaagcttttcagtcctgctcttttaattaatgatgtactttacaagaccaggtagctgtaacagacagttacgcccacttgttaatcacttatttcagtaagaagacacattggcgtttatgaatggacattggtctgtcactatatgttgatgaaaatgttaggatcttggtgaaaccacgctgcaaatacacagccagaggcagcactgattttccaataccactgctgaggctgggaaaggagacagaggattggttgcaggcgaccctgagggatgttactctctgttcttgcttgggcgaaatgactccttgcaatgtagtcaataaaaggttaaaaagttaagttttcatataaaaatatttatagttcatattcttctacataaacatttaaaggtggaaaaaaaaaaaaaaaccctccagcttggcatgaaaaagattaaattttctcccaaacattggtttggaaattttcccaaaagaaagctgtctgatcaaactgctgcaatcttaagcagtaaaaagaatgtactatatttaaatgtagcgatcggatttttctgatcagagtactgctgctgctgctgctaagtcgattcagtcgtgtccgactctgtgggaccccatagacggcagcccaccaggctcctctgtccctgggattctccaggcaagaatactggagtgggttgccatttccttctccaatgcatgaaagtgaaaagtgaaagtgaagtcgctcagtcgtgtccaactcagcgaccccagggactgcagcctagcaggctcctccatccatgggattttccaggcaagagtactggaatggggtgccattgccttctccgtgatcagagtacaagaaccctcaaaaatcatcttgtctggaatcttcagaaaaatacagaagctttatgatttagtatggatcactgtaggaggcctctgggaatcccacaactttttttcattgtcaccatagcattccaactgccttaaccttcatgactgtaaaaacaagtactttttcaaatttgggccatatctcccatgtggcagcgttctgggttctttgtcctcaatgtggttatgaccactccggaaatttaagaaagacatacacctctagatccaagctctagaaacatttccatattggagctgagaactctaaaaataacatgttagcactaagtccttgatattcaagagcaaaaatatagagcaagctgaaagtgtgtgtgtatgtgtgtattttaggaataggagaactttagaacacaaaattatgtgaagcttcactcactcaaagcacaaggaaatgtgagtaactgggcggtgaaggggacatgttccttgtacagttgggctgccaaatcatttctgttccctcaatatctagtgaagacacccctctctttgaaacttctttattgaatgaaatcatgggctcctggaggtgaagaccacatttcacaacccataaagcatgtgtttctggatcccaagcacctagtataaccatagtacataaagtactaaatataagattgatgaatgaaaggaatcaatgaatgagtaaacatgtatttataaactgctgtgactgtgaaatgtaaggctttgctcaataaaattagcttatgatatttttcagttgaaaatcttggttcaaacagctgcttggtttctgaaagccacccactttttatttttccttgtttgtttttgttttcctgagattaataattttgaaatgaatattaatgtctgtgaaagcattattaaagctctgatgatatttaagtgcatcacaggtttaatcatagtgaaataataaatagatccagatttcaaaattatctatattagattaaaatgtcctaatcccacatctcagatactttaaaaattctgtcc

SEQ ID NO: 63792 - DNA, 962 bp, Bovine  19866880527869
  misc_feature (1)..(1): n is a, c, g, or t
nagggatggtgtggagagggaggagggaggagggttcaggatggggaacacatgtatactaattaaataattttctattaaagaaaaaaaataaaaaaaaataaaaaaataaaatatggaataaaaaaaaaaaaaaattctgggttttcaacttcgaacactgcatatagcataatatgcagcatgtaacctcacatacaataatttttatggttttcgtttgatgagaaaaattatagttcatatggacattagcttattttgaaatcttcaaactttcaactgttaataggttatttccgctgttctgtgaggaaaatggtctcagaactgtgattccattaggaatgagaggaggtagggggttcttttcattatagaatgtagcagaataattttaaggagtgtttggctgcattagatttcctgtgggataggaaaccaagaaattaatggctatgggactaaaatagacagtgatcagtgcctgtgaatagagctgcttcagtactaaaccaactcagccttactgtttgtagggtaagatgactgtaccatatgactaccaaaagaattctttgttttgatttcgatgctccataagtaaaactcattcattcaagcatgtagtaataaagcaagactaattgcaatagtgatacattcttcttgccttgcacaccattattttgcttttaagaatacatcttttatcttcccaccttcagtagagtcaattatttgtggttcgtatctcaggtatagttttacatcctagtccctctcttttgatttgcccagttcacttaaaagcatcttgtatgtctgaatcaatcctggcattttgtcttatatgaggtttaggcttgtctagtaccctggagacttcttcagttcagttcagttcagttcagtcgctcagtcatgttcgactcctttgtgaccccatgcatcacagcaca

SEQ ID NO: 63793 - DNA, 1617 bp, Bovine  19866880705806
  misc_feature (1)..(1): n is a, c, g, or t
naaactactccttttattaaacttgatttttaattacgacaaacaatactctgataagatgcattgcgtatatttttgtgtacatatcttgcaggagatgtgggtttgattcctggttcagggagctcccctggagaagggaatggatactccagtactcttgcctggggaaccccatggacagagaagcttggagaactatggtctgtgtggccacagagagtcggatgtgactgggtggctaagcacacacgcacgaggtgtttccaaggacacagacctagaattggaatttcagggggaaagggctttatattgttgttttatatatcttgaaataaatataaacttttatgtgtcgagatggacaaagtatataaaaagttaattcacaaaacagcaataaatgaccaacaaacacattaaagatactcaaacttttactagcaggaaaagaaaaattaaacaatgggatattactttatagctattgaactgtcaaacattaaaaaacaataaaacctattactgagggcaatacgggagtaaattgccttagcttttcttggaaagcaatctagcaacatctattaaaactaaaattatatatagagttagaccaacaaactcattcttagaatccaacccataaaaagaaaagaccaaaaggttagaatatataaacaaagatgctttgggcaatattcatttttttctacaaatacttgccaagtgctatgttgccatcacttcagaaatgaataagacacaggccctgccctcaaggtattcatagccaagacagctaagtacccaagcagttggagttcacaagagaggtgctgaggaagcaattcaggcctgagatggagggctgcaaaaacttcactgaaaagtgcactcacataacttggtaaaatatagcctgttcctaaggccttggatttaagttgcatgatccaggagagctgaaaaggataaagataactggacatggggaaacataaccctaaattggacatgaaacaaaagtcacaggtaatctaatttttctaatggcaggggagacagaatatgaggtacacagtggaaaaaggacttccttgttgtgatagaatcaaaagagtctatgattaaatggtagccaaaaacattgtattgttctatgcctggtacagagtacactcttgaaaggtatttgttgacccaacgaagatgggaagagaatgtaaaaatgtttagctcagtggtgatcattttggaatgtacagaatatcgaatctatgttgtatattagaaagtaagatgatgttgtgagtcagttatacttcaaaaccaaacaaacaaactcaaagaaaaagagaccagattggtgattaccagagttgggggggaaggaggaaggggatgggaaattggatgaaggtggtcaaagggtacaacctccagctataagataagtaagtactagagatgcaatgtgccacatggtaaatataattaacactgctgaaagatatatacaaaagtcctgaagagagtaaatcctgagttctcatcataaggattttttttcttttattgaatctgtatgagataactgatgttcagtaaatt

SEQ ID NO: 63794 - DNA, 1612 bp, Bovine  19866880777409
  misc_feature (1)..(1): n is a, c, g, or t
naatgcctgtactttccttccctatacattttcatggtccaattaaagttttatagcactcaggcctgtgtgggaggtgacagtgtgcaagcttcagctctcttcaaagaatggaagatatttaaggaatcaccaattgatgtgttcttttcacatgcacagacccagcagcacacatgcacacacatacacacacacacacacacacacacacacacacaactagcacagcatcacttcagttcagttcagttcagtcgttcagtcatgtctgactctttgcaaccccatgaatcgcagcacaccaggcctccctgtccatcaccaactcccggagttcacccagactcaagtccatcgagtcagtgatgccatccagccatctcatcctctgttgtccccttttcctcctgccctcaatccctcccagcatcagagtcttttccaatgagtcaactcttcgcatgaggtggccaaagtactggagtttcagctttagcatcattccttccaaagaacacccaggactgatctcctttagaatggactagttggatctccaagttcaaaagcatcaattcttcagcactcagcttaggaagcattcattacattaattaatgagacaaatgtaacattcaaattctgaatgcgattttatcttagctagaaatagaacaagaaaagtgaagccatcatttggttagtgctgtggcacggcaggagaaatatatcaattatatatgcttgatccacacagaaacagcacggctggcaaaagtctgacttaaatttaggtcatcagttaataaacctttgctcagttgtcccctgcccagctcgtgggatgtatccaggatttcccatggcactgcatgtgagtttggaaagaagaaaaaccagaatcttcccaaatctacataaatcttcaggggtctactgtcatgggtttatgtcaggctgacctctgttttgccctgcttagagaatccagcttgaataggtcagtcgtgatttacaaaggcagaaagagaaacacatgtgttcatctcttggactgaaggatcttaccaggtcggccatgctagtcccactcatttttccaaccaccagattctcttttctcattcctctttcttcacacacagtctaacagcctattcaataatatgttttttcaactacactctaagaactatcaggacttacaatgacagtgagtactctgactatgagaaagtcaatgtttaatctcatctttttctcttacctctatgctcattctttgccttataacacagaaatatgtcctttttatttatttgctgtgtaagatctctggctgggtatagaggtaaatgtaatctgcagatgataacatagtatattttggtttttgacgtgtgtgttacaaattgccaatgattcccaagattcattttgtgatatcccagttgtaatatcccaaaaggtatcataaaattctcaaaactaaattaatttggatttaccattaaatttctgaagtaaatatggaacaatagcatttcttgacacaaaacataacaaagtcgttctatctccaaacagattcagaactatttattgttct

SEQ ID NO: 63795 - DNA, 1165 bp, Bovine  19866881028120
  misc_feature (1)..(1): n is a, c, g, or t
naaaattgttgttgtttgtcgtgctcagaccctcagtcgtgtctgactctttgtgaccccattgactgtagctgccaggctcctctgtccacggggtttcccaggcaagaatactggagttgggtgccatttcctcctccagggatcttcccttgacccagggatcgaactcttatgtctctaacatcttacatctcttatgtctcctgcattggcaagcagattctttaccactagggacacctgagaagccccattaaaataagactttacatattaaatccactagtagcaaaaaaaaaatttagaatgtcctcacatacacatacatttgagagaaaaatgtattttcaaatcatgagcataattcaaatgaattcgataaatctgctaagtaccaggcactgagagttcagtgttccaggtatataaagctgaataaggcaagtcctgccctccagaaatatattatttggtagtggagataaaagtaataacaatggcaataatgcaaggcagaatatagtaagcgtagaggtataagcaaagtgatataggaccacaaaaatggagaaattaatgttgattggaggatggggatggtttattctgagttttgaaggactgagaatgacaaagatcagtgagtcaggaaggacatttcagactagagaccagtgtgagcacatgaatggaggttagagataggactagtcaaggtggctgccaagttggatatgacagaggatggagtagaaaatcaaattacgaaaagttgaaaagttaggttcaaagtttctcagtgggtgtgctactggttttagggggtgaatgggtctttgctttcttagggagtgtgtgtcttctaaaagtcatcagtgctccatggcattttgaccaataaaaagaattctcaaacattttcaaacccatcctggggacaggcagtatcaaccctgcagaaaatgactgaaggtggcttggattccaaatctgggggcagtccttagccctgtatgtaggtgctgagtatctactaaaccagttctgactagagcaagggcctgagcaggcctgggattcaggacaatgatctctggagattaatcaaagaagagaaagaatgggataatcaagtcagtctatgcaatagtctagagaagag

SEQ ID NO: 63796 - DNA, 1785 bp, Bovine  19866880129395
  misc_feature (1)..(1): n is a, c, g, or t
ntgaaagtgaaagtggggagtgaaaaagttggcttaaagctcaacattcagaaaacgaagatcatggcatctggtcctgtcacttcatgggaaatagatggggaaacagtggaaacagtgtcagacttaatttttctgggctccaaaatcactgcagatggtaattgcagccatgaaattaaaaaacgcttactccttggaaggaaagttatgaccaacctagatagcatattgaaaagcagagacattactttgccaacaaaggtccatctagtcacggctatggtttttccagtggtcatgtatggatatgagagttggactgtgaagaaagctgagtgccgaagaattgatgcttttgaactgtggtgttggagaagactcttgagagtcccttggactgcaaggagatccaaccagtccattctaaaagagatcagtccttgggtgttctttggaaggaatgatgctaaagctgaaactccagtactttggccacctcatgcgaagagttgtctcattggaaaagactctgatgctgggagggattgggggcaggaggagaaggggacgacagaggatgagatggttggatggcatcgtggacttgatggacgtgagtttaagtgaactccgggagttggtgatggacagggaggcctgtgtgctgcgattcatggggtcgcaaagagtcggacacgactgaatgactgaactgaactgaactgaaactccatcatttctacacttgagatttaaaatgcttttcattgaatttttcagttttatcttatagtaaactttatatgacttactggccatttattgatattttaagcctttcagaaatttaagctgaacaatcatgaattttaaaaatattttaataatttcttctttaatatttttgagcatgtaaccaaaaagtccctttttgtaatgctttaggccttaaaagggcctccctggtggctcaagacggaagacttgggttcgatccctgggttgggaagatcccctggaggagcctggcaacccactccagtattctttgccctggagaatccccatggacagaggagcctggtgggttacagtccaaagggtcgcaaagagtcaaacatgactgagtgatgtttagcacacagagcacatggcacagatacatctaagatagggcagtacataatagggaacgtaactgtacatactcaggtgtcaaaatatacagaagttttcttatgctgtcagttgtcgggaggaaattttctgagaaattcaggccagcagtgtttccctttacaaaaattaaaaaacacacacaaaaaaaacacagatctccctgtttgctgctaaggaaagtgaaagtgtcaaaactaatttcttcctgctactgctaaaatcttaattcaaaaaacggaaatctcggctgctagtttaattgtatatactatttgtatcccaatatcacacacattgacattctaaaactaaatggtaataaccacaaaggttaattattttcttttcatgtgaggagaaaaacacttttaaaattaatcatgttttccacaaatcttcccttggaacacagacctcatgaggcagctgggtcagctttggctcacaccatcgttacattcattatatattaaaaccatttatcaagagcatagcattaacttgacttctgcaagaattttaagttcatgtgtttacataattaatgaatgtagtatcatagttcggaaagaaggcaatggcactccactccattactctggc

SEQ ID NO: 63797 - DNA, 1495 bp, Bovine  19866880340144
  misc_feature (1)..(1): n is a, c, g, or t
ncttataatattgtttgttgttgttgttgtgctaagttgtgtctgactcttttgcaaccctgtggactaaagcctgccaggcttctctgtccatgggatttcccagacaagaatactggagtgggttgccatttccttctccagagggtctccctaacccaggaatcaaacctgagtctcctggattggcatatggattctttaccactgagctaccagggaagcccatatacacattgtgaaacatgtaggttagctccagccgtcttcaaaaagctttaggcctctatgttctcttccaaaatctaaggcagtgattttaggagacagtccctatagtctacataccaggtgtagttttcaaacttgttgtgtgagatacattttctagaaaggtgagatatttactcctttgacgaggaagtgatgtttgaaaaattcagtatactttccatgtattttacagtctatagattttttaacattgtaggcctttaatactgataacactgatgacaactagtgaattaaattgaggagcaaattacagatttatctgtttaactcattaagagttacttaatagaaaataatttttatggtttccagaccaattcagtgttccaaaatttgaatttgtcaataaaaactttggtaacttattttggtgtgaaaatgtcagtttgaaaggcttcccttaagctgctaatttttcttttttctttcagcaagttccaaatgcacataaggattgggtctgtgccctggaagtggtaccaggccacccagttttgctcagtggctgcagagggggcattttgaaactctggaacatagatacctttgtgccagttggagagatgaagggtcatgagagtcctatcaatgccatatgtgttaattccacccacatttttactgcagctgagtaagtttttcctattggttacttgtgttcagatttaataaatactataggttgtaaatatttggaaatgtagaacatatgaaatctttcttttattacagctattccagtgtctatttatgatgttttatttatattttatgagatgcactgtggtcactgagtttgggctccccaggttatatgataatagtgttactgctgtatcagctctctgcttagactaggaagtctgctaccagatcttcctgtagcagttttaatttttttttaaaatcattcagaagtgattaatttctaaattgtctttccagaaaaggcatcaaactggcctcattcttcacatttagaccaaatcattaaaaaaaaaaaaaactcctttatgcctcttccgcctcctttaaaatctaagttacatagtaataatatataccccctccctcttagaatggctgaattgattaatttatttgctcatttgctcattcattatgaatctcctgtgtgccaggcactaatttcaaaatcttcggaatagagaattgaacaaaacacatataaatccta

SEQ ID NO: 63798 - DNA, 1837 bp, Bovine  19866880348213
  misc_feature (1)..(1): n is a, c, g, or t
ncatggagaaggacataggatgagcaggtttctcaggaaggctgggggttcagttttggacatacaaaatttaagacgagcaaacctccactactactcatgacagagtaacctgtgccaggttaacacttctgtgagttaacacaacgtgaaaacttgacaaaatacatggaacaactattttcagaacctgggggatgggtactttaggcctgtaattcctgagaaaagggaaacaagagaaggtgagctctgtgacagccctggcttgcagtctggaagctcttgccgcactacagcaaggaagaggggaaataaacagaagaccacagaatcagagttgaaaagacagtaataaaaatctgggaagtgtgaaatagctgtaatttgtaaaaccaaatagagaagaggggagagctacgctaaaaggaatatggagttatagggaaaaacattccatcagtctacatacataggggtcccctaacgtctttgactgaaggctaagctgcacatgagtagagtcagatatacggccagaccaaaacacagctgtgagagtcaagttctgaccagtagagtagagaatagcatcaaacattcaagacattcagtaaaaacacaagagttgaagtctcaaaaagatgagctgaaccacaagtaacttacataactttaagtaaaacccactgtctttaaaggaataaaacagaatccagatactcaaaacacaacacaacagtgttcagcattcaataaaatattatatgacataaaatcagaaaaaataagacctatatcataagaaaaatcaatcaatgcaacagatccagaaatcatatatgacagaattacttacacatggactgtgaattataaagtacctcagttttcccacctataaaataggaattacaataatactcactttctagagttcttatgaagactaaatgagttaatgcctaaaaacacttagaacaatgtctggtagatactaagccctatataaaggtttgttaggtaatgaataagtagaactaatttgaaaataggtcttctgattttcttggttattttcctgattttatgttacatggtaaatacatctgtatctgatgcactgtgggtaaactgaggacattttcagtttcttaaaaataaaactatatcattacatcatacctcagtgatcagacctcagtgagtcataataattttatagtgtcccacggctatgaggggtattatttcccataaattgtcaaggacaaacaagtttgtaagggaataaacaaaagtgatgaaactaagaaagtaatgtatctcggaaatagcatcaatgaagcatttaaggtaagcatcttagaaaaacacaaatgtatttagagatgtatttgatgtattttagagatgacagaaagtaaatttaaatgagatgagggattcagtggaaacagcacaaataaaaagagacaccacagaaatttagcagaagtttcaaaataaaatcagggtaattgtgtatttaggacagatgaatcaagaaatggctcaataaattaagtaacacaattggtacacaaatgacataaggagattttcatgagaaattacattttatttgaatgagatgaacgcctcacattatagtacgtatgatttcctttccaaaagtacttacacataatgtattatgatataatacatattatgtcatttttatggtcacatctctacaccttcttcaagcatcttcctaaatgccactttcttagtatgattttcattgtccactctgttgtgcaacccctgttccctagtgatgctctcatct

SEQ ID NO: 63799 - DNA, 2244 bp, Bovine  19866880431210
  misc_feature (1)..(1): n is a, c, g, or t
nttcagtaccttggccctgagttcacttcctggtgggaacaaagatctgcaagtcacatggagtgttcaaaaagaaaaaacgttacaaataagaaaatacggaagagcctgagtaattgcggttattgcttagtttgttccaaagtgttctactgtaatagttttgatagaagctgcagacatcagcaaatggcaaacaatggaatctcagtgttttctcctatttacaaaaacaaacaccattatactttctggtcaaaaagtgcctgtaaataaaataataaaacagtctacctcttgtacatcttttaatatgatgaattttaaccagtagctcagacttatgattatgtagatttagtttaagtattgttcaagtaaaacctctctttctttcccttttctagatgatgcagtgtttgaagctgggtgctttatctcggacaactgctagtacccaaatgaatgttcagagctctcgttcacatgccatttttaccattcactttgtgtcaaaccagaatgtgtccccagatagatgctgtgagttagtactaatgtcttaaactttcagatttcatttctataaaatcacatgagtatcaaagagaatatttgcgtcaagtttagtttgtttaattattccttttcctaatgagatgtccctggatttatttaagctaaagctggccagccatataaaattttgaaattaaaaatggactgtatttctgcagtagccagaaagtatggtgatggattagttacttgagacccttcgtttttgagggctgtatggtacaaatttctcttcaatataagcaaagcctcagttgatagctctctttgatctaactttgtctaagcttctagttgcaacaggcgtttttgtgcttatatttatttgactacaggcctatacttggctatatgaataatgaaggcaagatggggttgaaggatatttagtgtcacattaataaggtattttcaattattttcctcaattacaggaaattgcaactgataataaagtgatttctgaatcatcacagatgaatgaatttgaaactctgactgcaaagttccattttgttgatctggcaggttcagaaagactgaagcgtactggagctacaggcgagagagcaaaagaaggcatttccatcaactgtggacttgtaagactaagactttgtgctgggaatatatcagagttattttattatccttttccattttataacatataatacccaagtggaaatccttcatacactgagctgagaaatgaaagttactgtaaacttatagtaatgcattgaattttgatgtcaggctgtcaacttttttctccttttcacattgtaagttttcttcaagtgtaaaaaattaattggattaagttttatgatatgtgtataagatatgtatatatataatagaaatgattttaaaattcttctcaaatttaaaaatatactcaatattaaatattatatgggatgacctttaaagtagttttatgctaacatttttatgacaggctttattttggaaattataataacatgttatttaataacaattaacaattatttcaaaatgataacttttctcattttaggaattaactttaataccctgtttttgattgattggaaaacattttgtgttggagttagcctaaagtggtgtttttgattgaatggaaaacatcttgtgttggagttagcctaaagtttctactatctgaaagaaaatgttttgaaccaaatttttatgtaatctttttttcttattgatttcattataaaagtggttctttgttcctgcttagaagtaatggcattgtaaatttctgtgatgctgacagcatcagaatagatgttttctgctttgcctctctccctttcttcctagagcaggggatccaagcatatggtccttttttttggtcattgcccaatatttgctgttacatgattataactcttctgtgggggaattatcaactgagactgattagagagagccagtcttcccaaccatgcatcttgatgcttctaccatatggttgaatattgtggtcagaggagtgagtgagcaggatcctggactttgtgtattgttttgcattcttgagatataaaatcatggtatggtatttacatttgtgctgtttggaaaagacaaaagccattgctcagttttcttgttcaggctattgaaacatgttcagat

SEQ ID NO: 63800 - DNA, 3115 bp, Bovine  19866880491768
  misc_feature (1)..(1): n is a, c, g, or t
naacttttttcctatagttacctgcgttttgtgttaacacaggagagatgcttttcattgtgcaaaactggctcactttatgtgatctgaacttgagaagctatttctcaggtttcaagacaagttaaatgtatgggagcacctactagtgaaagctgatacagtcctacagaccggttttattggaccttgtaatttagtatgaggaagcccttacgtgtatagtcaagggaatcctgctgccaaaaaaaatgcttattgcttaaattttgcaagagagtggacttaggcaagaaatacaagaactaagaaactctataaaacattctatttagatggaaacacatctaagaaggataagttgtttagtgttgatgtactaaaaggtttcatgagggctgagatgaggtttgcctcctttacttctgaatccttagcatggtaactgacttgaatgtgtcattgtttactgaattaacaaatgttcaccagtttggaatttcttcctcaaaatatttgaaaactagccttttgtcctccttcttccataggaccatatatctatcatttacaataaaaacaaggaaatatataatttgtgtgacaaatttcctttttagaggaaaacaaatgcttctttgcttaaccagaaaccctgagccagctaaaaaatatactataactttggaattaaaaactgtaataatgaaaagtgacctgaactaattaaaaggaaggtaatgctgagttgcaaaggcttggtaatcaaatttgctaggctcaaatttcagctctacagtttaacagctgcatctggttggatgaattgcttaacttctgttctcactttcttcttttattaaattaagagttttgtagagatttaatgagtcaatgtatacacagtgttttgtgcctacatgtagtgcctttgttcccagtcgtgtctgactctccgcgaccccatagactgtagcccgccaggctcttctgtccatgggattatcccaggcaagaaaactggagtgggttgctatttccttctccatgggatcttcctgacccaagagtcgaagcttcatctcctgcatcttgtgcattggcagacagattcttcaccactgagccatctgggaagcccttgtgtctacctgataaataataaataatatctattgaatttttctccaaatgatggtactcattttcctaattttcagtggactgcaagcttcttgggacagggaccatattttatttattcctagagcctagcacagcatctggcataggttggtacttaataaataaatatgtgttgaattaataaggaaaataaatatttaaacaactatttggtgactattgtgcatggtacatcatataacttgtaactgaagtatatgaaaacactcaacagagtcatttacaatatagaaatagggaatgttttctattactggaatgatctgtaattcctttgattagtcaagattttctatgataatttaggaactcacaagtaatgttgagctcaaataactgtatatcagatgggagactatactacagtgtattcacatcatagccatattgtagctttaagtaaccacatggtgatttttaccattaaggaatttttctcatttgctttcattagtacaacccctactatacaatgcttgcttataagtgtagataattggttttgaaaatttcacaacaaaaactgtaaagccttttgtacttggtaattaggaaaggcatcagcaattctgaagaaggaatttgcttttaacgaaaatattctctacatccatctgaaagctctcatgtggcaaatgctgcaagtataactcttaattatatctaaatcctacctctcaatcatacctacatcatcagactggtaaatactctgagctatgtgaaagtattttacatttctaaatgaatataatttgtcataaagtagttatatcaaagacatctcttttaataaaagtgattaccactttatgcatatctcagaaatatgtaacattctctggatatgggttccaatatgtaacaaacttttctaggcttattgagtcaaaaaaactattccaaacagattaaaagctattaaaataggctaagactattgccaaacatgaaattatacttggaatcaaagtctcaaaacaaaattaacatggtcatttatacctttactggaagaacaaaatttgacacaaaaactaaactattatcaggggaaaaccattcatatcagaaacaaatgtaaactccagttgaatttcaagatatattattctccttgagattaatggagagagattttcacacatgatcttgtttacaagaaacacacactattttagactcatgcttggcataacattacatgctgtagaaatataatgcaacattttcatagaatgcaacttactttccaagtttataagttaaccaaaaacaacacattcaaaaatcagtatctataaattcataggttttttttttttttttaccaaaacaaaataaaacagatgtcaaaataatttgggcaaatagattcatttgaaaattgaaatatccttctttttccattcctcacctataattcaaagatggctatatacaaggatgctatattcaaagatggctattttatttatcaatcttactcacatttttctcaaaatttaactataagaatagtaaaacatggtatactcattggatcattttgtaaaaacttaaatgaaacataaatacaaattcaaattacagttttttcccctccaagttaggggatattggtcctggaagaaaattcagaaaataaatggacacaaaatgtgcatgcaaaatatgtttcttttagaactcttaacatttaaactgcaatgtgtacagcttttaatacagaattttaaaaatccttgaatcctcattataaattatgagttctttacttcagccagttggtaggatatattaaataagggctaattaaaaatctaatatttgctttggcattcttttcaaagtttcaaacacaatgtattttttcctaaatgcttatttcaaattaagaaaactaagg

SEQ ID NO: 63801 - DNA, 1200 bp, Bovine  19866880601018
  misc_feature (1)..(1): n is a, c, g, or t
nacttttcccctacagtggtataaactggataactactaatacataatttagataaatgaataatatttctcaagttttagttctatgcattttttataaaacctttgatgcctgcctcacctaatagtaagtagtagtaactgacaaatgaataaatgagcagttaattatactaacagaaaaacttagatgtactggttttgatttttatattatattctttcaagtaaggtggttacatttattgataattaaaaatgtcagcatcaaagaattgaaaatgtgaaatgttatggtgttctattataggcaccatgaatgacatccaggtcttctaccaattgaaaaactctgagagtcactgacttagcatctattatggctgtgtctaagtacacaaataaaatcctaaaccactaataattgagtatttctactttttctggcctatcaatggccacacaggcagtaggagattaaaatggtagtcctggctttcctactaactccagagcaatcgaatatgtaagatttatctcataagactattccatatagattatttctcattatgttcaataaatattaaagtgacataacagttccccttttgattgctgggtgtaggggtacattaatattgagtaagagtgcatattgttgaaagatttttctaacattcctgccccattttaagctacaaaccaatgacgtttccattttatacttaatttccatatcttatagacaataatcaaataattacaatacaagcattacaaattctctttacaacatctcatcttttattgctactacagcccagttgaatttcaaggataatagtgaaaatagcactgaaccagggaaacaggaaaactttagttgagcctgggattttcccttaaataaatttgcctgattaaggcaaatatgagtgtcaattttctcaaaagcaaactaggaaaaatatctgcctcaaaagtttgccataaggattaaaatgaagtgatgtaaatgagaactgtaaattatattactataaattgcaaattataaagtactatttcaatgtatattataactctgattttgaaaatctctctattcttatagcactgctatttttaaaatgtggtggactcctttgaacataaaaacaagctaagtatttcggacagaatttgcaataaataatc

SEQ ID NO: 63802 - DNA, 2808 bp, Bovine  19866880613368
  misc_feature (1)..(1): n is a, c, g, or t
nagaagcctggaaggctgcagtccatggggtcactgagggtcggacacgactgagctacttcactttcacttttcactttcatgcattggagaaggaaatggcaacccactccagtgttcttgcctggagaatcccagggatgggggagcctggtgggctgccgtttatggggttgcacagagtcggacacaactgaagtgacttagcagtagcacagagctctttatttaaaattctgtcatcacatttatcacatgctaacttttattatttatgtgtgtacctttcttctttattcattcaatcatttattcatttgtcacataatctaaaataactccccaaccagttcctctgtatcacatcagtcagttttattcatataatttatttctccatttatttgttaattgtttcactctatctactacatttgccctctttagacctaaactctgtggaccaggaatctttgcttgtattatttattgcaatattcatagtaccacaactcaatgaacatgagttagagcagactccaggagacagtgaaagacagggaaacctggtgcactgcagtccttggggtcacaaatacttggacacaactgagtgactgaacaacacagcacctataacaatactcagcaggtgggagacatttaaaaagtatttgttcagtaggttcataaatggatgagtaaacaaatgaataaaaaatgatgcaaaagaaccatatatgaatgaaagaatgaaaatgaattaatgagaatgagtgaaatcactgagaaagatacgaaaagaagggcactgtctccttcatacccttgtaaattaaacccacactattaggtaaaaatataatgcttattctttttttctctgttgaaaataattgagcatcttgagacatcacaatatttacttcacacactttctttccttttctctagaataagttaagaagtaataaactggtctcaatcttcccaacaggatgctgaatataaacgttctacaaacatttcttctaattcactgattcagtaaaaattagatatcacattaactgtctaattggatcacctatctccatgttttctttctttctgagctaccagaaatgtatatccttcctctttctacttctctgggtaggtcgcaatatccctcaaacaggtaaaggagacccagaaatttatagatcctatagcctcactattatcaatcccaatgaccatgaggtctttcctcaaattagagacatgaacagacttttgctttcttcaatgtttacataaaattcagtggaaactgaacattttaatgaccactagactcctaatggtaagaacaaaagggtgaatttatagcagaaagcagttcaattcttatccataacaagtctattagaatgtagcacttcttcttgcctcaccacaatcctaaggcacagactgtcttgggcaatgatgagcaaacagagcaagactctgtggggcccagttcaattcagtcagttggtgtccaactctttgcgaccccatggactgcatcacaccaggcctccctctccatcacaaactcccaaagcttgttcaaactcatgtccaatgagttggtgatatcattcaatcatctcatcctctgccgtccccttttcctcctgctttcaatatttccagcatcagggtcttttccaatgagtcagttctttgcacgaggtgcccaaagtattggagtttcagcttcagcatcagtccttccaatgaatattcaggactgatttcctttagaatggactggttggatctccccacagtccaagggacttgcaagagtcttctccaacaccacagttcaaaagcatcaattcttcagtgttcacctttctttatacccaacttatacatccatacatgaccactggaaaaactatagctttgactagacagacctttgttggcaaattcatgtctctgctttttaatatgctgtctaggttggtcataacttttcttccaagtagcaagtgacttgaattacatggctgcagtcaccatctgcagtgattttggagcccaagaaaataaaatctgtcactgtttccattgtttctccatctatttatctttctttctttttttttaatttaattttatttttaactttacaatattgtactagttttaccatatatcaacatgcatctgccataggtatacaagtgttccccatcctgaaccatcctccctcctctctccccataccatccctctgggtcatcccagtgcaccagccccaagcttccagtatcgtgcactgaacctggagtggtgactcgtttcatatatgatattttacatgtttcaatgccattctcccaaatcatcccaccctctccctctcccacaaagtccaaaagactgttctatacatcagtgtctcttttgctattttgtatacagggttattgttgccatctttctaaattccatatatgtgtgttagtatactgtattggtgtttttctttctggcttacttcactctgtataataggctccagtttcatccacctcattagaactgattcaaatgtattctgtttaatggctgaataataatccattgtgtatatgtaccactgctttcttatccattaatctgctgatggacatctaggttgcttcgatgtcctggctattataaacagtgttgcgatgaatattgaggcacacgtgtctctttcagttctggtttcctcattgtatgcccagcagtgggattgctgggtcatatggcagt

SEQ ID NO: 63803 - DNA, 2682 bp, Bovine  19866880662875
  misc_feature (1)..(1): n is a, c, g, or t
nctggcgcatcaggcacttaatggggcaccttgggtggggtcctactctgtagctctgtgcatcagttacttaaaggagcacccttggttgtgtcctaccctgtagttcagtgcatcaggagttgatgggccagcctctctattgttcagctgccaatgctggcatgtggggagagagagaggatatagtgatggttccaccctctacatgtgactcagcagtattaccttgtgtctatggctccccgactttcctccacaggcatttcacaccacaatctcctccctcacatcccctcgatttgtctctccacagtcaacagcagcccttgccctgggattgctccacaatccctaaattccagttcctagctgctgcgccttccagaggacccgcattcctgtttggggtatatatggctgtggcaaggactgtctgattctcattccattgaggcttacgcagaccagctgtttcactcccagccttaaatgtttctcctctgactcagacaattgccccaacgtggggatcggacccctgcttcagttccccaacccgctgagggcaggcccagtcctaccaacactcctgtttcccccctagttccttcatcctaatgagttttgcgtggttctatatattcgtttccattggtcagttactcctgtccattctcagctggtgttctgcatgcacttgtgtgtctgaaggtgtattcctgatatatccgtggagagagatgtactccatgtccaccgactcctccgccatcttgttctccctaacttattttaaaaagagtatttccagtatgtaataatgttaatactctggtttgataattatgggatatttatcaagttaagttcagttgctcagtcgtgtccaactctttgcaaccctatggactgcagcacgccaggtttttctgtctatcaccaactcccagagtttacttaaactcatgtccattgagtcggggatgccatccaaccatctcatcctccatcgtccccttcttctcctcctacttctcctcctgatctacagggatatttatatatgttattgtattaagggagctgaacataagggaactatttgttctacttttgcaactatttttaggcctaaaattatttcaaaatgaaaaactataaatgaaacacacattcgtgtgtgtgtgtgtgtgtgtgcgtgcgtgcatgtgtgtatctccagaatctgaccagttctcactccctttacttgtactggtcagatcatctcctgcttagattacagcaatagctacctaaacatctcccacattctattgctagcttctctcagtttattttcaacccactgttcatagtgactctattagaacataatgagttatgtcatcgcttagctcagtgtgatccaatggcatgatgtaccttgcatgacaatttgatgacactttggcctttctaccttgtactctcaccatcctccacttctgtaatctcatttcccattcttcttcccggctccagtcatattgcccacttcattgctccttaaacaaacatcagatgtgttttcacttgcaggtctttgcatttactgttccctctaccagggatgttattctagtttcctcatgtctcatcctttcacttcttttcgggtctttacttagtgtcatcctcttattgagattcttcctgattattttccttaaaatacaaaacattaccatcacccatgcattctgtatactcctttattttgtatagcattaatcatctttaaacatgtattacattgtgtttatattgcttattgtctttctctctcctaaaaatgcaagctgcatgaaggcaaaacttttgcacattttgttttctgttgtatttccagtgcttaaaactggtttacacactatagatactgaataaatggttgcatgaatgagcagtaatcaccatacagattgaatttaagcagtggaataaagtataaaaaggaaagagaaaagggccccggaccaagacttgtgagtttcaaaccttacaaactgagaagtgaaggcctgcaaagaagtccaaaataaagtcacttgaattactggtttaaatgtagcaagtacctcaggaataaaagagcacagtcaactattaattgctatttggaattcaagaacaataaaggaggacttttagtcatctatgaacatttactaagtatcaaataatatgtattgtttggagatataaatatagtgagcttacaatctagtgggagaaacactgttaaagagataaattcaaagaaaatgaaaaactttaataatacccatgttcaatgtgagtatataaagggggtctctttgatctaatttaagtgtgagggtacaaagaagagcctcagaacactttcaagattgggcagaatttggccaaagacataagggttaaaatggagaaaagttaatgaaagtagttttaaatatgatgtcatttaagtactaaaacactttttgaattgatttaatgacttataagtagaaataaaatttagttcaaattcttttttatcttcattaaaagctcctcaagagaataactgtcctcttggcttcctatcaacagtccttagctccctggacagctagctctccattcccctgtaaagctaccctctatgtt

SEQ ID NO: 63804 - DNA, 979 bp, Bovine  19866880892475
  misc_feature (1)..(1): n is a, c, g, or t
ntaaaattcactgaaaaactctattcactatttacaactcattattatcaaagttccttgtatgattgcttgctgaacaatggaaagcaggatcttttcaggcagactcttgcttgctgtgatgtggctttcaaccatctggacacatacatttatacacataaaaggctaactcctcttcattctcatgctgattttaggaaagcgctgcgctgcagcatggacctggcagagttacttacccagcaatacgcagacagctaatgactaagaatgtgacatcatacatgaccttcaaaatataaacactagaaattccaactaaaaaataaaagtgtatattccaagtgttattgcaaaataccctcaagctttcctggcttagtgactgctagtggaagaacacaatgctctggggaaagaacaaaagtactttgccataagtgtgtgggttgggattagaaagagtcatgctctctgatgaggcaccttctcatcacatcctagagcaaaaccagaaaataattgcaataatagtagctgagaagagagtgctgcagtgaacaaagaacaatcatatgcaagcaagcaaaatggtctcattttggtggagtgagagaactactctttgctagcagactagactaagacttgatatgtagataagaacaaaaaagattagtttcctgttccagcagtgacgtccacagtgctttccttaataatgcatctagaaattaacagctttctttgaaggtagaacaattctcgcttgcctactcaacacctactccaaaatcagttcatacgtagagctatttctgcctattttttggtgttatttctccatcacatctctaaacagttttaaaccaaagaaataaccaaaggaactaagtggtgcaatttgctcttgccacaattagccatacataacttattccttgcttcctacacagtacatgctttttggattggt

SEQ ID NO: 63805 - DNA, 1795 bp, Bovine  19866881025643
  misc_feature (1)..(1): n is a, c, g, or t
nctcctggacatttatttggtgctcccttttctctcccctgtaccctgtccttcttcttcctctctttcttcttctctctctctattttgtctgctatttaacaacaacaaagaaccaaagaagcatgtacatatctcaagctgtacatatggaagtttccttgggatatatatcacttttttgcaagatacacgcccaactttagtatgtaatacaatcaatgtaattatttttaaaaaacactaaaaaaagtaggagataggttataaggttatagtaccctgggcaaccaatgataatcatgtggatacgggggctaatagtactaactgtgagaagtgatcggacttgggatatattggaactagatgacaagaatcaacaatgctccataattctgtgcctaagaaaaaagggtagctaattaagctatctataagaatgaagaaactaagatggtcttccagtttcactcagggtgaatttattaaccttggaaaaatgctccaaaatatcactgttcttgtaacactatgagacacaataaaaatattttttctttaccttctgctttctcctttcctgcttgatcagaaccctggtcctgaaaatggaagcagcattattttacaatgattaaataaatggtctctaaaacaactgccattttatctgaattgaagtcttggaattagaatctaaaagtagcaataattattttctgagaagaaactataaaaatgctctcaaattatttataaaatatatactgtttcacaaaattttcctggataaaaaacccaagaactaataaaacagactctagacttatggtgaataattaagcataaaataaatcagttataaaaatcaagataagcagagaaatcagtgcattggaaagaatatatcactgaaacactcttatctgatagcaatattctaggtcaacactgctattttctttgcctttccttgtaattcaatattctactaaaattaacacagaatagagagaagataaaaatctatataggatctaacgaaatgttaaatttattattagagcaacttcagttacattagctacgtgtatctgaaacctcagaacttctttaaaacactgctagtcattatggatgtgcttcagaccacataaccttcatgccaaaaactgcactgaatcccaatgataatgcagcatttaagagttataaaatatttgctctattaataatagtgaaatgctataaaacatttattgataatgtaagcaaatacacacaatgtatcttttggacatacatgaattatggtctcaaattcaatagttaagaattataaataaaataacataatgtattctagttatatgatattatacaataacatgacaataaaattgttaataatgagtaccatgtatcttgcatcattctagatactccagagtctttacatgtaaaaactcatttaatcttcatagcaactctataaggtaagttctatttttactcccactttactgatgaagaaactagacacagagaggttaattaatttgtccaaggtcacactgctaataagtgatagagccaggattcaaattcaagaattctagcttggaaattttaaatcagtgccttctacttccttctaagcatgctaactgtgaataaacagagttgttcatttttccaaatgattttcataaactacatgaaggacagttctgaatacccctagactctgctgcttactgaacttattatttacatatttcccaacagatgt

SEQ ID NO: 63806 - DNA, 1375 bp, Bovine  19866881142967
  misc_feature (1)..(1): n is a, c, g, or t
nttctaaatagcaatatatttttcattttgaatcttttattagctaacttctaaaaaatcaagttacaatcaacattttcaagtgattttaatgagtcaactggattggcaaatttctaagatagtgtttttccctataaaatttccctcaagagacctgtattcagcatagtaaatacttagtagtctcaacatataaaatagcacttaagtgttaataatcttcactctacaaattagtaaaaattaaccatccttatgttcctttctcttatttaaaccgatagaattcattttttaattaaaattttaattatgtgaaacagttcattaatcttatgggaaaaagaatcattatttgctgtacattttaaagacatatataataacagatgcagaaaacaaattcattctccaattgtccaatctacaattatgaaacacaggctaacatcaaagcagagtaagtcttaagataaacactcctcaattattcaattattcaatagatgctaacagaattttgcaagtacttcttaatggtctataatggtgatttcagccattttccaaggagtggcattcatttgaaaaaagtaatgtaaatcatttcactacatcaagtaatactgaaaattcaactccttagttttggggaggaaggaaacatgaaatgtgtattgagtcacagattaaatatgacttttccttctccttttctgtttaatattaaactactgtgttttattttctcaatattttttcaccttatgttatatacattcttattgtaaacattttaatattctttgcaagcggacaggtataaataaacaaaaaatgcatatatagacctatcttttcttatattttataaacaggaactatttgccccttatgctatttgtctctaagttacttacgttagcgttcgaacacactttgctgaatctctgatatcccacaccttaatataagatgttgacacagtgaagaccaaacttgtataattacaatattttacagatactacattgttgggatgacctcccagtgacattatctcctgcccagtcaccagattccatactttacaagtacgatctaaaagcaaataaaaaagaggaaatattgtcgataagaactaaattagattttcttagcaataacaatttctctcctatgagaaaaaatgagataagaaaatagtaattatttaattaacttgcaatagcatcctaattctatccttgacattttgcagcaggttcaagggcaaagtaggtataaggattagatgaaagctaggatatctggtgtatgcatcaagtggtattaaagaagtaattatacaaaattttaaaatagacatatt

SEQ ID NO: 63807 - DNA, 699 bp, Bovine  19866881232877
  misc_feature (1)..(1): n is a, c, g, or t
ntggactttgtacttgcctttcaaatggcatattggcttacatgaagaggtcctctactagtatttcaaatttaacatctcccagaatcaaacttttcatctctcctcatcttatctgctactggcataaaacaaacatgaagaccataacatgctcagtataaaagatggtgacaacgagatttaagcattagttggatgactgaggtaaaaaaagtctttaaaatccctcccaacatatcctctatgaaaaagtgagaatacatttttaataagacaacaaaatcaggaactgagtgaggaaaagatcaggaagaaaaagtaaagtctagaaatgagaaaaaaggactgattaagagaaaagcatcctatgtacatctgaaaacttcaaacttatcatttaataggagaatataattcaatagccttattatacacactctgatgtaatgatccttggagccagtgatgattagatcttgtccattagaaatccggtctacagtaagacacataacagggcctagatgtcctgttaactttcctgtggactgaaacctttaaaaagaaagaaaaataattttgtttgaaaatatttcttagtatgctgaggctaagtgtttgctaaaactgttcttttttgatttaactccgtctctatgaaacgctcctcaaattaagagtcaaaaaatagccaaa

SEQ ID NO: 63808 - DNA, 732 bp, Bovine  19866881251059
  misc_feature (1)..(1): n is a, c, g, or t
nataaaagtgatttaatgaaatactatattttattgatagtgtttttattctggcagtaatatttaggtctgtttatatctctaactaaaaatagttgtgtctgttaaaagcaaattaataatttaagaaacaaatgctacaggttctttattaccttcaacatctttgcttacctgtttaatcttttaaataatggtccagattgtgctgtttcatatgatggattgaaagtatcttgattttcatttaatttagaaaccaaggaatgagaataattaacattactgggctgaaaaagaaaggaagagctgccaaaatggtaatgtacagatacacaatttaaattatttattataaaatgccatttaagtgaatacacatatattcaaaaaatgtattattttaatctaaaagaaaataattgcaccctattgaaaataaaagtttctaacaatgaaagcatatcagtatttgagtgattattaaaataatacagttgatactatggtgagctacatattttacactggttaaaaaatacccagaacaccaggatctgagtaaataaaagttaaatttctctcatagaaatcacgtaatcttttcaagaaaacagctatacctaactcagtttttccatctactgagtaaaattttagactgctactttaatatttctgaatatcaatatcattgagtgcaaaatgcagaaaggattgggaagactattg

SEQ ID NO: 63809 - DNA, 2360 bp, Bovine  19866881331163
  misc_feature (1)..(1): n is a, c, g, or t
nacatacatggggaaagttctaagcagaattttaattgaatgtggattccttagggcaggtgacacaacctcaaccatcttgactgtgcccagccaaggaaagtagcagggattatgggagaccagatgcaatgcaaaggctccaagagacaatgcaatcccttgaaatcaagacttcagtgtgaaatttgacaatggcaaagattttgcatttttcaaagaaaatatgtctcagggctaaacttagtccttgcaaataagctaaaatacagattaaatttctcaaacaaaattatgataagacactgaggggagaaccttaaggaagctgaagatcatcagaagaattgaagagaagactgttaattcaatgcagtaaactaaagttaaaatcatatactttatacattttctattttctggtactatgtgtttttattgaaatggaaacaggagcaccttatatttagttttgtatattttaatctacccaataaaaataatcttatcaaaataaatgaagatgttccagcagggaacactgttcatttttcttcctgccaagaataacatgtcattagactatttgtctctgcatctagcagcttaataacatttgaaattctgcaattctatcagtcacaggaagtactatcacaaacgtggacagaagtcactaccttagctctccagttgcctgagaaagaaggaaccaagagatctgtctttagaatttttgtcatggaccttcaatgttgaaacccaaactaaactaaactaaacccaaactgagtatacagctaatattaaaagttattaaaaatgtcattgtagcttgtcactaattctaaagaaaagaattcacttggcagtggtttcgaaaaatcctattttcaaatcttgaatgccatggtttttgttttcctgaggtcataactgcaaactagttaaggaagacactcacacagacaaagccaaatccagtataacaccgtactatgaccctggtgatgaacagaaaacaaaagtcagtagaaacgaaaatatagctggcttactctgggtaagtactttgaggggggtaattttattatttgtataatctttctagggaaaaaaataagtctgaagttttaaaaagcagaaatgttaaatgaagcacaaacaaagcacaatactattatgacagatacctagtcagagtgggagaatgatatgcataggccctgctgttgttcaattgccccgttgtgtccaacttttcgtgaccccatggactgcagcatgccaggtcccccatccttcaccatctcccagagtttgcccaagttcataactactccatcggtgatgccatccagccatctcatcctctgacgcctcatcccttctgatccccttcatggatcactgccttgttgtggtgaaggggctgagtaactcgatgaagttatgaatcatgccgtgtagggccacccaagacggacaggtcatagtgaagaggtattacaaaatgtgatccactggaggagggaatggcaaactaacccagtatatttgccacgaacctcatgaactgtataaaaagacctaaaagccctgaggctttggttactcatcagaagcagagaatgttgcacagagcaggaggcacagcatgggagaattggtctgaaacagggcaggaaagagatggacaaaagtaatgccacaaatggttctagactttccgatctgctgaatgctgtggttgtcattaaataattttaagtcaagatggataagacttgactttatttcagaaacttcacagagataagaaggataaactgttggaggtgaaatttaaggctgaaaaattctctgcacatcttctggtgttgccctgtcatcttggcctcacaccctccctcacaaaaggaggttcactttgattttctctcttaggaattaggaatttgggagccacctatgtgattaaaggactaaaatttttcaggggactggttcaagatagtggaatagaaggacctgtgcttatcttcccctgtgagagcaccaaaatttgcaactagttgttatacaaccaccaacaggagaacactggaacccaccataaaaaagatatccctcatccaaggacaaaggagaaggtgcaacaagacagtaggagggactgaataatgataaaatcaaatcctatacctactgggtgggggacccacaaactgaagaacaataatatcaaagaagttctcccactgttgtgaaggttctagactccacatcaggctctgtagcctggggatctggcaaagagactgggaatctccagggaattgacatgaaggttagtaggg

SEQ ID NO: 63810 - DNA, 934 bp, Bovine  19866881434135
  misc_feature (1)..(1): n is a, c, g, or t
ntgccttcgagactgagagctaggggtataaaagccgataagaagctatgccttctaaaatggtctccattgaaagcaaaccacagttctttatatgcaagaattagagcttatctaactaacatgagtttttatcacaaacaggttggtctatagcagaaaagttgaggtgtttttaggattttggatatttttctggttataaaaatcttttaaatcagctgttttattttacttgagaagtaaaattataaatatgttaaagtcaagtcaaatataatttacctaacaacaattattattcaccaccacacccagagacattttgataaaaaatttcagtgaagatctcatctgtgagagataatagaatgggttaaccatggaggtgcagaaattttagggggagtattttcgtataatagaagacttgtgccatatcagcatttgtttgaatttggaacaggactttcctctttaggttagatctgtaattctgcagtatactttagaatgttaatatttacagacattagctgtcttaaagatatcattctaaactaaaatcagcaacatttgtaacacttaaactggggaaaattcactcttatgtgtttactgtactttgattcaaaatgccttatttatctagagatagtattctaagtaagaaaggggtagaaatgccacaaattgaagcaactcttccataagcttaattaaaatcatgatgatacattcagcctggaatttagtttattttcagctagtcatctgcagccatgattcccacagagggaggctgccagtctcacagcacactgtgcagcttggatgaacagtattacaggctgcttatgagcattttacatctggggatctgtggagagcagccagagcagcaagacagcaatactgaatgcagggcatttat

SEQ ID NO: 63811 - DNA, 784 bp, Bovine  19866881491035
  misc_feature (1)..(1): n is a, c, g, or t
natggtgatgtggggaaagattgaaggcaaatgaagaagggcacagcagggcatgagatggttagatagcatcactgactcagtggacatgaattcacacaaactgtgggggatattggaaaaccgaggagcctgatgtgttacagtccctgaggtccctagtcggacaggagttagcaactgaaaaacaagtgcttccaccattctcagatcctctcctccattcctcagtgcacctcacctcatctcacctcatcccatattctggctacttataatttcttttagtaagaacaaatctatttgtcagttcctctatctaccctctcacttctggaccttgagcttaggccaggattatactttgttcaccaatatattacctacgccttcctgggcatcccctattaagcactcagaagtgtttgtcaaatgaataaatacatagctgaacttttaaatgaatgatgaatatgtggaaacatcatatgtctcttcctcctctcttatgaacattatgatttggtgtttagttttatttagaactatttatctaatgcttttttttttttttctaatctttatgaaactcctctctctcccaaacattatttgaaacatttagaaatatttattttcttggaaaggaaaggcactggcattttaaactggatgtatatttagtatgttcagctttatcccatttggcaattagaatgtttacataaatttgcaagcttatcttcctaatagcataaatataaacacaataaatatttaccca

SEQ ID NO: 63812 - DNA, 807 bp, Bovine  19866881560201
  misc_feature (1)..(1): n is a, c, g, or t
nagtcagtggaacaaagaagatctgaactcaaactccaaaagcattactttcctcaccaaagttcatcttaaaagattcaatcataaaagcaaaattatgtaatatgcaaataaacatatttgatagtcaaaaaagtcacaaagatgactgcttttagaaacagaagttcctgttactgcagtcttttttcacataaattagagagcgtggttcttatcagaatgtacagagaacaaacatataagcaagggcggaaatctactggatgattttgcagaatactcatcctctactgctgtgtttattattttgataactgatatttgtagcatttttctgcttgtcaaagacagcaagtgggactagtcttaagtgctaaggcagtcttaagtcatcttcaatggtttgcttacctttctattccatattttttaaattcaatttgtcatcacacttttaccttttttaccaactgtgctatcagggaagcctttatttcacagtaaaacaatgtgtgaaggacatagtcagttcagttcagtcaattcagtcgctcagtcgtgtccgactctctacgaccccatgaatcgcagcatgccaggcttccctgtccatcaccaactctcggagttcactcaaactcacgtccatcaagtcagtgatgccatccagccatctcatcctctgtcatccccttctcctcctgcccccaatccctcccagcatcagagtcttttccaatgagtcaactcttcgcgtgagttggccaaagtactggagtttgagctttagcatcattccttcca

SEQ ID NO: 63813 - DNA, 694 bp, Bovine  19866881827371
  misc_feature (1)..(1): n is a, c, g, or t
nttaatattttacatttttatttacatttattttcctattatctcacttttttttcaaatgaaaaggtaaactatgagaaatataacttattctaaattagtacagcatatattaacaagcaaaaaaagaacataacttaccatctctgaactagaattgaaacaactactatctgttggccttggagagtaactggaagactgactactccgtgaagaatgaagatctgaaaataaagatttaatttgccaagtttattaaggtaccatatatttgctaatttctaaagactagtatgtattaatacatacacaggcaaaaaatagctgctggtaaataagttcagttaacatgctatggaacattttaaaagttaaaattttggatatgtggcagcttgcacttttgacagggtattttggatttattctccatgtatctgccttccaatgcaagacatgtgggctctatcattgagtcaggaagatactctagagaaggaaatgacaacctattccagtattcttgtttgggacatcctatggataaaggaacctggcgggctatagtccacggggtcacaagagagttggacacgacttagtgactaaaacaacaacaataacaacaaaacgtgtatttacaagtaaaacaaggggaggaaacatacgggaagaaacgagaacagagaaa

SEQ ID NO: 63814 - DNA, 990 bp, Bovine  19866881929198
  misc_feature (1)..(1): n is a, c, g, or t
nggtcactgagtttgcaagcagaagagctaggatgaatcaagatctatctaatgtcaaatctgactcatatgcatttgtcatttgatacagatcttcatgtagttgattctgttttgtgtcatctaagatacattttttttttattggggggaatgttatagggtcttcaggctgcccagaaagaggctcaaattaaagtacttgaaggtcggcttaaacaaactgaaataaccagtgctacacaaaaccagctcttattccatatgttgaaagagaaagcagaattaaatcctgagctagatgctttactaggccatgctttacaaggtaatttggattgaattttagttaaatacattgcatggtaactttgctttttgagtatgctatactctacttctttcctctatagcttgactgaatagatgctgtatttacttatgcttttaataattattccttttttaatttgcatgtataaattttgggggatataattattgtcactacaagaaatgattagtaacttaaaaatactcacttagcattattaagcaaataatttttatgaattaaaaaagatcaacaatgtttctgagttggttgtttaaattattaaccaagcttcattactttattctgcatatctaactgtcttaaaaataaatgtataagtgtttgctatggcatctattctgcatatcttataaatggtacataatcttgttttatgtgagagttcttaacattggatctgttttgattggagtattgctttttgtttcctttttgctgttatttatacagatctagatagcgtaccattaggtaagtatgtttagctttctgtgtaccctacagctgcatgaattactaattgttcatgtacactaattgtggtacatcttatttaaaacatttttattgacagccagctggtttttgcatgatcttttttgaaatgtatctgtgaccacaaacatactaag

SEQ ID NO: 63815 - DNA, 1324 bp, Bovine  19866880407749
  misc_feature (1)..(1): n is a, c, g, or t
ntcctgatttgcctgaaacaggggctagtttgaaaaccaggcaattcccagaaaaccagggcaagttggttactctccttggtaactggaggttactgctcccttagccagccaaccagattccaggccccaggtctactgctggtaagaaggaagggaggtctgaatccctcacttatttcagaaaataatctatgcaaccatattacactcccactggagaaagcaagttaatggtgcttctgatcaaattactatatccttagatcacgtaggtcaagcacctgcaaacttttcccctgaagggccattttttagtttgtggatcacagggtctctgtcacaactactcagccaggtccttatggtgggaagcagccatggacaatacaaaaatgaaggggtgcacctgtgtttcattcagaggtgggaggtgggcctggatttggcccatggagcgtctgccaaaccctgatgtagattattaatacagaatcttttgagggacttccctggtgatctggtggctaagactccaggttcccaatgagggggcccttgttccctggtcaaggaactagatcccacatgccacactaagacccaatgcagtcagataaatagataataaagaaaaatttaaaaaaaatcatttgcatagataattcaatctgaagaattatttctggaagttactttaattgggggtatggccagtgggccattggggagctgtcttttggactaacctattctagtggaggtgatggaattccagtggagctatttcaaatcctagaagatgatgctgtgaacgtgctgcactcaatatgccagcaaatttggaaaactcagcagcggccacaggactggaaaaggtcagttttcatttcaatcccaaagaaagccaatgccgaagaatgctcaaactactgcacaattgcactcatctcacacactagtaaagtaatgctcaaaattctccaagccaggcttcagcaatacgtgaaccgtgaacttccagatgttcaagctggttttagaaaaggcagaggaaccagagatcaaattgccagcatctgttggatcatcgaaaaagcaagagagttccaggaaaacatctatttctgctttattgactatgccaaagcctttgactgtgtggatcacaataaactgtggaaaattctgaaagagatggtaataccagaccacctgacctgcctcttgagaaacctgtatgcaggtcaggaagcaacagttagaactggacatggaacaacagactggttccaaatagcaaaaggagtacatcaaggctgta

SEQ ID NO: 63816 - DNA, 1114 bp, Bovine  19866880466100
  misc_feature (1)..(1): n is a, c, g, or t
nttataaagattttatgccccagatccttccacttaattctcagccccccccccctttttttttgtgatggttcctatttgttcattcactcattctttcacctattcacccatttatgcactcaaaaaatgctgagggagtcactgcggggattcaaagaaaaacaagagagtttctcctgttaggactgttgtaatccaggggaggagacaagagtgtgcagagatgactccaacacagccaggagcaccgcaagagcaaatttcagcaatgattcaagagacggtcttctgcagcgtgtgcggggcagggctctggcttcagctgtaggagctgctgagagcacagtaacctccacaaacttcatcagagagcaaaggctgtgtctttttcatccagcaagatctggatcattccctgatccacagaactaaatatccatgccaatctctgcctctttctatgcagggaattgagaaccaggaaaggaaataggatcaaaggtacattgaagctctctcggtaaaaagtccatcagtgtgctctctctgggaaagcaagcaggccagtcctccccttggactgcccagggctggatgtccccactctggaccatgctggctggcctggagaggatgggcacaccagtgattcaatgctagtggctccaaggaatctagaccccaccgatcttctaagcaaaaaaaaaaaaaaggaaaaaaacaaaaacatgctcaaattaatgcccagggaatcaggactattcttattgttaccatatttcttttgatccctgaataagaacacctgggcagtcctgctgtttggcacatgggttagtaatcaggtggaatattttccttcatagcttccctggaaccctgggacgcatgattgctaaagcaaacctcataaatgctcatttatttttaatgcgtgtgttttaatgtatgcaaaatatatgatacacataaaaaggattcgtaagatatatgcacggtttgaagcttaataaaatgaacaccatggacccactaccctgctgaagaaatatatgtcacattattagtaataagaagagttaatatttctgagcccttatcatgtgccagg

SEQ ID NO: 63817 - DNA, 1598 bp, Bovine  19866880492010
  misc_feature (1)..(1): n is a, c, g, or t
ntgtttgtcactgagcctcccaccaagcctgtagctgatgcttagaagtactggttgaatgaaagaataagggactgtaagaaaaatgctcttctttgcccttgttgcccataggagtaggaggagctttggagaatgatgatccttccaaaatggtcatggtattggctgccactaacttcccatgggacattgatgaagcattgcggaggagattagaaaaaaggatatatatacctctgccgacaggtatgatgccttccttctactctattttgatctttcttttactccttgttacctttctctgtttctctgagtcttcattctgttggcattctgcttatagaagtttataaataaccaatttgctgtttttggagacaggctacagtgaagtttctacattcagggcagtgttgttttttccccccatggaacatgctttattttatttaatactaatacaaccctgttaggtagggaatgttgatcccacttcacagctgaccagtgttcccgaggtcccagacccaggtgtaataatagctgatatttgtgtgcttctactgtgctctctgctgtcttagctcctcgacgtacttacccagtactcctgtgtgagagaaaatatataattagaaagataattgatgacagaattttataaactgctgaggaaagcttagcttggggggaaagatacgagttgatggtacaaaggcagagattcagctttctttgaaatattggagaacatagacgtggctgagtgttgagattttttttctaaacttattttcctgtatgaaaaggttatgtccgtcatgggtaatgacttttagatgcttctctttgcttattactagtctgaacgtgtgtaccttgtgaccatagaactggagaaattgctttctcctaaagggctcccaaacaaataatcgtaatcagaactccactatttctaacttctttcatctgtgttaattaatttcacaggtgtttatttagctctttgctatttgaaggacatttattattaggtattgtgtcaatataatgtgtgacccttgtctttagagagttcctgtatgattggaagggagccatacacctacccggtttaactgcagtgaaaccagggagcacgtgatactggggttgcccatagtcttttggggtggaaatgaagaatagtaaattctgaccgaggtgctgaggggagacttcatggaggaagttgcatttttcactgaatttccatagagaaggatggaaacagaggcatggctgcttgaaaatgagtagacagctgttgtgggataatctggtgggatagaagggtgttgaagaatctgatgggtaaagggtgtggaagagacagaactataaagaaatgtgggaagacaacaggcctgaaagaacggtttagaatcaagagtaaaaggaatggaaagaaaaatagatttagaaagttaaaaaaattgaaggacattttatgaacaaaatctatgccatgaaaagacgtttttagtggaaaaagcaagaagtacaggaatgaaaatagataaaacaagaaaagccacccaaaaaggcat

SEQ ID NO: 63818 - DNA, 1023 bp, Bovine  19866880506531
  misc_feature (1)..(1): n is a, c, g, or t
naagatattattgggacttgcctggtggtccaataggactcagcactctcactctaagaggtcaatccctggctggggagctaagatcccacaagctgagaggtgtgtggccaaaaacaaaaagaaagtgttattactgatgtctcatcactctagcatcagcatcttctctaacaaattcttcagagaagaccagacttttgcactaacattcctctgttagctcattatcatcacacacacacacacacacacacacacacacacacacaccccaccccaggcagaggtcaagagctaaataagaataggtcttgatatctggagtttgaatagaaactaagaatattagactaattcataagtgtatcttaggtatgaaaggcacatctgatcaggaactgagaagcaggaagataatgcaaagcagaatggttgtgctgctgctcagcctgatttctaaaaaacacaactaatgaatcattcatgggcaaaaaatcctttcagatattctgaccattgaaaactgagggggaggggaaattgagagaaatttgagaggaaaattcaagttctgacccctgattgttaaaatgaaagatcgagggaaagccaggatccctttagaaaatattcagagcaaaagtggaggagcactgttagcactcctaaaattgaggagcactgttttgattgagtacaaggatgtaataggtgtcaaagaggttcttttttttttttttttcttttaagaaacaatatcttttggtcatttgcagctctgtgagactatggattaaatacagctttcacagattaatctttatttttgtggattatgttagtataactaactccatgggttaggagctgactgggaataggaagggatacatttagattcaatttaaaatttttcgtactgtaggatatggggagcagtggctcagtgccacatccaatgagtcagtgagttttctggcttgtgttagttgttgtgtaggtacagccactgtgctgata

SEQ ID NO: 63819 - DNA, 2526 bp, Bovine  19866880531800
  misc_feature (1)..(1): n is a, c, g, or t
nacagacctcggatttctagtggtggcaagcaagaaccttaaccccagcgtgacttgcaaaagcgaatttagagtctctgaaaggccggcagacttgggtggacgaaagagcctcctttctttaaaaaaaaaaaaaaacactcctggctgagacatgagccacgctccttatcagacggaagccaggaggcacctggaacagggtctgctcagcagatgcagagagatgcagccgtctgctgcagagcccgcttgctcccttttagaaccgttgtcagagaaatgggcttttttaggagacactccatctgggaagacagcggaaacaatgctatgcatgtaaagtacatctccctttggatctttttgatcggagctttcttcctgccttctttgtcctggaatggatcctgaaagaatgcagactgaaccctcacactggaagggctcacagaggagaggaggtggcctgaggtgaccatgttccccttcactcccactgccctcctccccacgactaccccctcttccttagcttccctgaaaaccagtctgaggagccactgctcttcagagcccccatctcccatctcccatcccccttccccagagatacaccccaccacacaaggagtgaatgttaaatgcatgcaataactttatctattcatatcactgaatggatgatacctatgacaaacctgctttagcaggcagattcttcaccactagtgtcacctagctcagtggtaaagaaaccgtctgcaatgcaggagatgtgggttcaatccctgggttgggaagatcccctggagaaagaaatggctactggctccaatattgttgcctgggaaatcctatggacaaaggagcctggcaaaaggaattcatgggattgcaagagttggatacaacttagcgactaaaccacaaccctgacaaacctaggcagagtattaaaaagaagagacatgactctgccaacaaaggtccatacaagctatggtttttccagtagtcctgtacagatgtgagaattggatcctaaagaaggctgagtaccaaagaattgatgatttcaaattgtggtggtggagaagactcttgagagtctgttggacagcaaggagatcaaaccaagtcaatcctaaaggaaatcaactctgaataatcactagaaggactgatgctgaagctgaagctccaatacctctgccacttgatgagaagagctgactcattggaaaagaccctgatgccgggaaagattgagggcaggaggagaagggggcgacagaggatgagatgggtggatggaatcatcaactcaaaggacatgagtttgagtaaactccgggagatagtgaagaacagggaagcctggaggacttcagtccacagggtcgcaaagagtcggacacaactgaaggactgaacaataatggcattcctatcacctgtgttagtcttgagctcttcctgcatgaagcaccttcagcttttgtgctctggggcactcactcagcatttcataaacatgtttattactttaatccttctaaagtgcccgtccagtctcccagccaaactgcaagctgctcaagcctgggactgtatctcatccacctctctcatcctggtacctattcatagtcagcggattctgtgtttattttttattttgatctattacacaaataaaacatgctcacggtagggttgcatgtttattggcagagtaaatcatcacagtacacaattcgcaggctccacagcaattaaagaaatgtaaacgtttagaaagagaagatattcttatatgcgtattgcatggctgtttttgtttagttgctaagtcgtgtctgactctttgcgaccccacagactgtacccaccaggttcctttgtccatggaattctccaggcaaggatactggggtgggttgccatttccttctccaggggatcttcctgacccagggatcgaacccgcatctcctgcaatgtcaggtggattctttaccactaggccagctgggaagcccgtgtattatattaagacaaatcaataaaggtgataaaatactatgtggagacgatcataggaaaggagtgtgctaagacagcattggagggatgctgtaatctggttaaagactttgggttactacctgctgacatctaacaggacgtataaaggtcctcatggtgagacttccctggtggcccagcggttaagactccatgctctgaattcagggggcatgggttcaatccctagtcgaggaactaagatcctacatgccttgtgaaaccggccacactccgggaatcaccacccatgtccaaggcaaggtggccatccggtcctcttgggagtgagtgtgtgcagcaaaaccccagagcagagggtcacaggctgcccagagaggccccacaggctgaggccggcagctatggtgtggactacatcctcctacatagtgaggtggtgccagggagggcacccctggacagcaggaaggg

SEQ ID NO: 63820 - DNA, 969 bp, Bovine  19866880565232
  misc_feature (1)..(1): n is a, c, g, or t
ngctgagggaaaggaatgcaaacaaagttattatgcccacttttgtttgtttgaaagaggcagtaggttgtgatagctgagggcgcagacttccgtgtcaagccacctggcttcctgtgacttcctacgtggcttttctcacgtggaaaatgaggaccctaagaccttaacgcagagagttgttatcgtcgtttaggtgctcagtcgtgtctgactctttgtgagctcatggactgtagctcgccaggctcctctgtccatgggaattctccaggcaagaatactggagtgggttgccatttccttccgcaggggatctttccgacccaggaatcaaatcagggtctcctgcattggcaggtggactctttaccactgagccaccagggaaggcaggtcctgcagagagctgttaggaaacgtgaaagaggtgatgtcttaagaagaacccaggcctggcacctagaggtcctcccaaagtacaggggtgactgagggacagggcctggagcaaggagccaggctgtctgtacagacagaggagggcagaggccagccaagtgcccaccccccgggatgctgtcaggatgagggcggtgatacacgagagcccttggagcgagcgtcacatcaccatcatcaggctgccatcgattcatcactgtttctgagttccaacctggtggtgttcagagcaatgcggagagtggtgtgctgggccacagttcacaccccaggcatctggctgacacgcagacaacagcaaacccattcacttgggtctcactgcttaattattgcaacttggcacggcttccggtgccttgagagcccttggacacgcaccatacgttttgggcaggaaggcacggctggcacggggacgggcccgtcaatcctgcagctctgctctgctaagtggtggatgctctccaaacactcggccccaaatgtacgggaagcaaaagc

SEQ ID NO: 63821 - DNA, 770 bp, Bovine  19866880712064
  misc_feature (1)..(1): n is a, c, g, or t
ngaaggtgggagtcaagaagcccgtcttccatcaggggtaacgacagctctaagaggcaagtgtggatgctgcctactgatgggatgggactgaagggaagaaacggcagggcagctgctgcatccaggtacctgcagccagagacccccgcacagccaaggaatgaaagtgaagtcgctcagtcatatctgactctttgcaacctcatggactgtagcctaccaggctctgcggtccaggcaagaatactggagtgggctgccatttccttcctgctgccaaatctgtggggctgagaaagataggagacaagaaggaagactgccttgctctccctggaagatcaagacaaaagcaggcattccaggccttcaggagaagcaaagaagatgcttgaacatccccaaggcctaggggagaaatcctagcagagccgataaatatggggttcatcaccttggatctgtctttgtcagaggccaggcagagtctctcttcgagcagaagatagacttacctccccacaggatagccctttttgttggggaaaaaaaatagcacccaaaatggcttgtggggctaaatagaaggtgaccaccaatccatacctgttattcatgaaggtgttaaaaaaaatcaacaacagaaaacctgtgtgcttttttccccaaaaggttgctgttgatccttgttctaaggcttccttttgatttccaagaacagaaataagcaagtaggaaggagatagcatatttaatatattctagca

SEQ ID NO: 63822 - DNA, 750 bp, Bovine  19866880712113
  misc_feature (1)..(1): n is a, c, g, or t
nggcacattaaagttgttaatttgaacattactggttttagagctgtatttgcattttctttatagatctgttttagttttatggttgtatagaagttaataaggattaaagagtttcttctaaaagagcttcatataacattattttagggtgagcagtatgatctaattgattcattttgtatacactgtgttctctgttaatacaagtcttgtgctttaagaagtacaaactgttttggttagctcctctgtccatgggattctccaggccagaatactggagtgggtagcctttcccttctccaggggatctttccaacccagggatcgaatccaggtctcccgcattgcaggtggattctttaccgtccgagccaccagggaagtccagtaaaattagtgaaatcagcacaaacagtcgtatcactaggtacacgcaattaagaggatcaaactgacttgggttagcttcataggaagaacataagctgaagactcgtttgaggatggcacgagtcttattacatggaaaaaaaccagagaaaggatctctctctctctctcacacacacactccaaaattctgtcatggatattggcttgaaaatgcaaagcataaatggattttataccttcttgatcatgtagtagttcagaaaacaaaggaagtgacatgaatcaaacattcactttctgtcaaatgccacctaagcagggtgtgtacagaatagaccaaaaatttaaaaa

SEQ ID NO: 63823 - DNA, 1330 bp, Bovine  19866880759187
  misc_feature (1)..(1): n is a, c, g, or t
naaaaagcagacggtctggggaccatggtgattcggctggaagtggcgaagcccctcgtgccccctggctgggtttggtcattcactgaaccgttcttcttgtggctcttgcagctcgtgttggtatctgggatttgaacttgacctttactcctaaggacaatcacgaacatttatgttggaagcaagagcacagcacatattttaaaatggaaaatctcagaagtcaagtgaaatggagacatggaaagcggggaggttcttctggggtttaccctgggaacttgagcggaaagaggactgctgctggaacgtgacacaggcaaagtttccgtttagaaactttaaagtcagagcagagaacaagtgcccttaggcaccaaaaccctgcacaatgagtggactatgctgaaatcaaattttaaattgttagccactaaaataaagttaaaatagggtaagactgaacaggaagaaatagtctacaagagaaatctgatgtgtgaaattttgatttttatcctcattataaaattttttgtgctttctgctagagatttctgccaagaaatgtgatatgttgaaaaagaagaggaaatgtactctagatgctgtgatgagaaaaggatgtttaaagtgacaggaatcagttgagtttctcccagtgaccaaggttataaaaatcaagctctgaaactcccaaagctgggtgagaaaacaaaacaaccaaccaaccaaaaataaaataaaaacaaaaacaaacaagaacttgagtaaaagcaacatctaaatctatgttaatataacttacatttcccacaatgtttgtcttatctttgttcatgtcagatctcttatactgttaattccctctcctgagagccgtcactgctagagccagataggcagctggggagaggaggcggggtgagcgggtactgtgagaagcagggctgtttttctcatgacctccaaatccaaaagatgctgccacattcgtgggaggtgcatcaggctgtcagtcaagtgctcaggattcagaacaagccaggtgggaggagccttccccaccaggtctcagtcacaggaaatctgatgccttaaacccccatctcaacactcagtgacttcaacttatggctattaattagcatctgtggtctcgggtagcctcagcctgcaacggcttggagcggagcttgggctgggtcgcggcagtgcgagcacctgatcctagccgctagaccagtggtcaatgacaagggccctggccctttggctttgcagaaaagaattgccgcaaagacggaaagcagcgaaacaagtcaag

SEQ ID NO: 63824 - DNA, 1377 bp, Bovine  19866880837843
  misc_feature (1)..(1): n is a, c, g, or t
ntctccaggccagaatactgcagtgagtccccattcccttctccagggtatctttccaacccagggatcgaacccaggtctcccaccttgcaagcagattctttaccatctgagtcaccagggaagccttatatgaaagtccctcagttgtgtctgactctttgtgacccaatggactatacagtccatggaattctccaggccagagtactggagtgggtagcctttcccttctccgggggatcttcccaacccagggatcaaacccaggtctcccgaattgcagacagattctttaccagctgagccacaaggaaagccctattcaatattagatcttgcctaaaggtttcttccttgacaggtgaaaattacactgacttctcctatttcaccttctcaatatacttgaaaaggtcacaattctacaaatatgtcctaattctacaaatgtcatacacttcagagccaagacatacaccatacctgtagtttctttaaatcaatagtacagtgttatgttgttgctgatgtttcaaacagcgcttaatctcttccctgcataatacatcaggctctctttctcccagtgcttcatctgattgttgacgtgtttgaatttcgctttttcctggttaccttcctcttagggccctctgtccggctccaacctgagttactgcctcctcagcctgctttatcgttgttcttcaggctttctttcagccatcctcacaggatccactcctcctatagcctttctacttttagtccctagttttgcctgagttaccattctccattatctaggaatgttgcttgaatgaaataatggctttattttacgcaacttggaattgctagttttgtaatccaggggatgtttcttcaggagaaaatgagagaatgggggaggtaagaaagtggttttttatttttaatttttttaatttttatagtgggtaacttaagatgtgttcataacttttttttttaaacttgtttcctgccaggggtctactgttgtaaacgacagtgggatgaaagagaggaatactaggaagaggctggcaagataaggatgctaaaagaaaagataagagaccaccgagtgatttccctggtatttagaactctgcttccactctacctgtacaggttccatctctagttaggaaacttaagataccggccaaaagaaaaaaggtcaccgtgaggtcacttcctccctgttttccaaggccaaccttgcatttcaaggtactactatcttcaaggaagctggtttacagttacacgcccatcataagctgttgcttcagagtccaagacagaggctcaaatgactgtatttctacctggaagtgatgccagtgg

SEQ ID NO: 63825 - DNA, 762 bp, Bovine  19866880986668
  misc_feature (1)..(1): n is a, c, g, or t
nttttacaggttaaggccctagtcccagatggccagagtttcaatgctgattttcagtgttttctcaaagaacaaatacaaataatctgtcaaaattatgaaatgatggcgcctcccctagtggttcagtggttaagattccgagctctcagtgcaggggtctgggttccatccctggtcagggaactagatcccacacactgcagctaagagtttgagtgccacagctaaggatcctgcacgccacgatgaagatcgaagatcccgagtgccgaaacaaagacccagtgcagccaaataaacctatgtatttttttaaaatatgaaatgatggtcagactcaaaccaactgcgtactcttccacaacacggcacaccaaggaggagtattcatcaacgtgcttgccgtagaatgcctactcttaacacatgagatctaaatttagatagctacatgtggaaaatatgatctttaagacagtgaaatggaattccgtttcaaaaagatgggcacctggaatgctgtgaagttctgctgctgcttcagtaaggcaaaactgaagaaactttacaaaaatgtatttaaacccaagactctatatcactactaacaggaggctgaggagactgtatataaaaaggctaaaaatatctccatttgaaaatagcagattgtgaaagagtatatgactgacagatattaaatattaagggcatgactaagatgtgtatgcattcgttcactaaagtctcacattcaaa

SEQ ID NO: 63826 - DNA, 1166 bp, Bovine  19866881090099
  misc_feature (1)..(1): n is a, c, g, or t
nctgaaagctcttggggctggactctggcttgcctatttttgatttctacttcaagaatactgccaagcacgtggtgatttatcatttccccactccctttcccataaacatttggttccgagggattaaaagagtgcttcactcttccttcgcggattttattgccagcaactgacacccatttttcaagtctggacactggtgtttttgatgttcgtggataagtatgcaatgacaactgtagcctggccaacagactgtgagaatcttcattttataagaagcatcttgatttcatatatgttggtaataagtcaactaaggtctgaactgatccttgctagagttcagctctgtttggtttcatttgtagaaaacacagtagtattattactaatagcctttgcattgacccgattcccccccacccccccataatagcttgagataaaattacatagtgtatttactcatttagtacagaattctagaatctccctggtggcccagtggttgagaatccactgtcaatgcagaagacaggcaggtgaactaatatgcttctattttagattctgggaccatggcacttctacacaccaggctagtctaacttcaacatagctatctgctacagagtaaggtcaagaatgatggtggattattggtaaaatacagagggtgggaggagtctggtacaggacgtaggactgccatatcctttttggtgatgtaacgttactggttttcctaaaacagtaatagctagtgaaacttattgacctgagatagcttagtaaaatgagtctgattttgggaaaaggcccagtggcagcttgggaagtacagaggcaaaaaaaaaagtctataatttgcaatgacgtctatagatttgccttcactgcttatagtaaaaggctgcacagtcctggttagttgctcttcagcacatctgtttttggaattgtaacactaaggaagaataatattctaggtctgtctgcctcccaataggtatagtagatggcagctttggttggtaaggtggattcataatttttagtgttcataaaactgagagactggaagaatttttgcttatgcttacattttctattcatgaactatctcctttatgtataaaaaaatcaatattttatgaaat

SEQ ID NO: 63827 - DNA, 1051 bp, Bovine  19866881171666
  misc_feature (1)..(1): n is a, c, g, or t
nttaacataaccaaagctactagaaataaaaagtcatagtgaaaaatgtccttggttctttttactttcatgagagaagatgacagttttcacgtggtggttgaggtccatgggtctacaggcagactcttcctgaaggttctgaagcgatgccgggtcgcccctggcccggcagcacgaaagacaaagaccacggccacaccgcgcccggcagaccgcttacaggatgacacaacagttactctctccagtcttttcacgattcctctgacctaggcaaagtgaagagaagcctggtttataaagatgcttgggggaagcagagggattccagcataataagaaacagattttttttttttgcttaatgttggcattttttaaaattaaaaggctataataaatacccttttagttttagcctgtctccaaaatgcctggttatccgcttagcgagctctgaccataaactatgaaaacatcctttccccagaatatccaagagaactggagccatttgtgaatgcctgcctctgtggtgcaaggcagaaagctcccagcacacagctcaccttgggagtttggctctggcaaggtctctctggccaccaaatgcatcactgttgttttgccaaaaggaagctttaatgctgtgtgaaaagaagacagtttgttacatatacatcaacctgttggaatcactcaccagaattgagaccactttaaaaattgactgctttctgtatgacttcctcaacagatagcacttcttaccggatacagcatttcttacataatgaagttaggttaatattatcagaagcaatttttataattcagaaattatttagctatgactattagtctgacatataaaaacatactgtgtaaggaaggggaaagagaaaatacataattgcttaagctaattttatttagtcacctaataaaattcctgcatcaaagaggtcaccacaatgtagaaatagaagaaatgacatattaatgattttaaacataataataatacataattttattattttcaacc

SEQ ID NO: 63828 - DNA, 1138 bp, Bovine  19866881258880
  misc_feature (1)..(1): n is a, c, g, or t
natgtttatatatttgttttaaatcgtatatagactaaaaacttaggttttcaaactctggtcaatgtagttaactaatagctaactctattacaagttttggtgtttccttttaaatgagtctactacgaagactggtcctattgctggtttatgccctcttcccacaaatttgctagatttataaataaatttaggtattttgctttcacttcaaaataacaattttagaatctgtttaacctagggtatatagttctcaaaatatacttaatatatatccatcttctaaaatagcatagctctttttcagagtaaataggatttttgtttaattgtctattgacttttttttttccagggttcattgagaaatccttagtgctattgacatgtttcaagggacataaattagccaatgactcggaatgacggattccccgaagagtggaaatggtttgccaatggttggaccagggcctgatatagggaactcttcactccacatggtggggtacttgggaaaagttagtgcacttattttttgcctcagtgcaaagttggttttttccctcctgtttttgagacttaaatttggttttaattttaccaattaatttctaaaaaattgtatcttccacggaaatcttacagtaatggcgaaagactgtttctgtttacctctctgtttctttgatatgtgaaagtagaaaacatagaccttatggtttactgtttgaatatatcaaacatattttcagtggtaactgacgttactttttctcttgcaaataaaactaatgctattcttaacacctactttaatatttaaaactagaatatattctttttggaataatagctgtattaaagcctgtatggatttcttttatttgctgtcttttaagatatcttgccaggatgcttctaggtgaaaattatttaaaaatgttctggttacttttacatttaactttttgtaatttgataaaatctgtgagtgtctaatttactttttttctcttttagaattatgattcagtgaaagttttgtcagatggatattgccctgcttgtagggcgaagggaaagttaaaagccttaaagacttaccgaattagttttcaagaatctgtct

SEQ ID NO: 63829 - DNA, 1275 bp, Bovine  19866881419144
  misc_feature (1)..(1): n is a, c, g, or t
ncttctcctctagtgtggtgaatgaaatgtttatcaccaagtcttatggaacaactgttcagtggctaagagtaatgtgtgcatttactcccagctttgttaatcatctgtctcataaccaccagtttgttggatgtgatgatttagggcctattggagtcagtgagattttacaatagaggtattcactatctttccacacatttcaggatgatcaggcttgaccacgctacctggacaaccatgttgccacagcagacttaatttgtttcctggttaataatctaccacatacctcaaacaaaactggaatatctggtcatctggttgccaaatgcgctaaagaaaattgagatgaaaacactggagtttggttaatacttgaataatttgagtttcattattttacaaagctttttcagatagggatcaagcatatatgtgttttctgactctctttccaaaaatttattacagtccaacttgtttcaatttaaagcaccagaataccactcaagatgccatctcttggaaccccaagacacacagcaggagtgaagtgatcataaacataaccttttaatattacagattctatctgtaatattaatattacagattaatattacagggctaatctcaaaagattgaggagtaacctgagtgaactttgattcaatggtttgatatctaaccatttgtactcttgtcaaggacctgaaatacatcagagatttcctgtttgaactgagggccatagtcaggatggacacatgttggttatactctgggcgtgattataagctgtcttcatgcttgaactcttagtgaggcgaatgcattttctccttcctttatgaggctctcatgagctttgtagtgcctggtaattaaggaccatgatgatatagtggaggcccctcagctgcatgccccatgggaagctgaacaacatgctgtaatgagctggggaggtatggctggagattgtgggcttgaatggcaaccctgccacttatgagtggtttgatattgaacaggtctctccacctcttttctttctgatttgcaaaaagggataataacatgttctttccagactactggaataatgaaacaagatagtatatgtcagtacatctggcacctggtagatcttaataagcattagtcaaacctgaatctggactcaaattcaccaaaaactggaccaatgtgtttgttgccagcactgggccaaaggagtaggcatgcatcctgaaagaggtagggcct

SEQ ID NO: 63830 - DNA, 2875 bp, Bovine  19866880422292
  misc_feature (1)..(1): n is a, c, g, or t
nggatgagttacagccccgccgcctgccgtctgtgatggagactgctggctggctccctacattcattctccccttctctctcagaaaatgttccttccttgttttcttccttttcttcgtttctttccttgctaggcaggagtggctgagaatcaaggctacatcttccagctcgctttgtggcaaggtgtgactttctgactcaaaaatccgtccaataggatttgagcagccgtgatgtcgacctgtatcttctgtgctcttaaagggccgggaagtcctcccctccgccctcgccttgattttcctggtgggggcaatgcagacgtggaggggagagaagcggtctgtgtggtaagagcagtactaggactggcagagcaacgagacggaaggggcctgggcccctggtgctggccccgccctttgggcagctaacgggagaaagagtcggctttccactcttgaagctgccagccggcatctctggcgtcgcaaactccgctgaacaaaacctggccctgctgaggactaccttacccactccctcagcctggattcagtgacacttgctcctgtggactttgcccaaacaagatactggggtgagtttttgttatgtgggctgactttgtttttttttcttatttaagctattgtattgtgaagttgctcagtcgtgtgtgactctgtgcagtcccatggacgttagcttagcaggctcctccgtccatggaattttccaggcaagagtactggagtggcttgccatttccttccgggatttgaaccttggtctcccacattgcaggcggacgctttaccctctgagccaccagggaagcccaagctattttattagatacctgcaagttgtatggatgtgagagttggactgtgaagaaggctgagggccgaagaattgatgcttttgaactgtggtgttggagaagactcttgagagtcccttggactgcaaggaggtccaaccagtccatcctaaaggagatcagtcctgggtgttcattggaaggactgacgctaaagctgaaactccaatactttggcctcctcatgcgaagagctgactcattggaaaagactctgatgctgggaggcattgagggcaggaggagaaggggacgacagaggatgagatggctggatggcatcaccgactcgatggacgtgagtctgggtgaactccgggagttggtgatggcaaggggaggccttgcgtgctgtggttcatggggtcgcaaagagtcagacacgactgagcaactgaattgaactgaactgaactgaactgaagcaagttgccagatccagttgtgatgaagaattttcttagaccaccaggcagccaagcccttcctaacccctccctgaaacgtctgcttccactgggtgcttgtctgagagcccacaaccagcatcgtgtgccaattccaaaatcctaacacagcattttcataattacctagaaataacatcctaatacattgccatgggttgatctgtctcatttgttctgccaaaatattctttgcatcctaagtactactgaatagacaccctcatggcactgcgctcatttcatcacgaacttacttttccccatgctcaattagttgttcactgtatccgactctttgcaagcccatggactgtatcctgccaggctccactgtccgtggaattttccaggcaaaagtactggagtgggttgcgatttccctctccaggggatcttcccgatccagagatcaaacctgagtctcctgcatctcaagcattggcaggaagattctttaccagggagccattttggaagaccccaattttcccagagaggtttaacttaagagttaatatcaaggacctttacatagctctgtgccaccctggtatatccaaatgatacaaccgagaagcatttgtcaaaagtagagtgtattctgaagagacagatgcttacattttttccccttaccttgaactaaacactatttccagagcaaaaattacagaccagctttgctgcaggccacagcagcaaatccaaacaatagctttcctggcagccctaaagcagacccgtgacccccagcacccgtcatgacccccagcacccgtcacttctgtgggttgtcctcactgctcttctctccacaaagaagtacattttccaaaggacaaaaataagcaagcaaggctgtctgtcattttaattcttcatttttctgaatagaatgtttgtcttggtctattaaaaactacagggccactcattcggaatcccttcattaacgggcagcattaagcctaatcccttttgctattttgaagaactgtcttctgtgcgtttaaaagcatgctctcctggtgaggttaaaccctccacctctcagcactgtttcattttgctcaagctcctgacttctaggtacacagggcatttttatgatgtcactgtaattaattagagaacagaactcatattgtacctagagaaagtattcttgtattcactccagcattcttgcctgtgaaatcccatagactgaggagcctggcaggctacagtccatggggttgcaaagagctggacacgaccaagcaactgagcactcaggcacccatattgtatccaagagatgaacatatgcaacagtatttttaagctctaaagaaaagtacaaacactggctgcctttattatccttcagtacctaacacatagcaaaggctcaatacatgtctactggacaaacttaaatgtggacaaataataaaggaacaaagagaaacatttcattaaaataataatacattaaaaatatacaatctcccaaggtgccagcattgctg

SEQ ID NO: 63831 - DNA, 1322 bp, Bovine  19866880761890
  misc_feature (1)..(1): n is a, c, g, or t
naggaaagaaatatatggtttgaaagaagaaagaaatacatcagagtttggtagagagggaaggaaaaacagcattcagttagaactccacagactaataacacgtacacaattctattgtctaaaccacttaaaaaacaaattgctaagaagagattattgaaaaggcgctttattgaagacgttagattcttccactgaacatttattggaccccattatgtgcctggcactggaaatatccccactatttgttaattgcagtctgtaatcacacaggggaaagcactgtgtattttcactaagactgaatagctagggccaacaaatttaatatttaaatgaaatgactaacctccaggagagatacacagtgagataatccttgcttaaggaaaaagcactctttatgttccttttggacagtaattggtcttgaaagcaattatttattgaacgcatatgtgcccaagggactgtctggaaaatggaaagtatttccagacttgaaggaattttaggaggccttgtagataagggatggatgcatacatcagcattgcattgcatgtatgtgggctcagtcacttgagtagtgtccgactctgtgtgaccctatggactgtagcccaccaggctgctctgtccgtgggattctccaggcaagaatactggagtggcttgccatgccctcctccaggggatcttcctgacctgggaattgaacctgcgtctgcctgcgtctcctgcattgcaagtgtattctttacccactgagccatgtgggaagccccagccttgcattggtagatggtgaatgtgccttgtgcatggaaaaaactcaagggctccctgaggtcttctttggggagggtgctatttccctgcagctggtaggcaagggagttatcagaacacatttgacaagtcttaacatttctatttgtcaggttgaaagttagtacaccatccatgccaatgcatgtttagacatttatttttcttatattacactctggagacaagtgagaaaggaagtttgacaagcaatttgtgttatgtcagttacaccaaatcacagcccatgtctgcccctctaatcacacaaagcccatgaggcgtgaagttccaggggctcatgaggttaccgagaagtatggaaaagacacaaggagatgttagcaagcagaatcttctcatcagtaacttgctatgactgtcctgtggtgtttagaaagtaactcaccttcacccatctgtaggggttccctggtgtgtgctaagtcgcttcactcatgtccgattccttgcaatgtcatgga

SEQ ID NO: 63832 - DNA, 2347 bp, Bovine  19866880884589
  misc_feature (1)..(1): n is a, c, g, or t
ncccatttggcattccaatccattttattaattaacttttatcgttttcaactgaggtatagctgatttacaatgtggtgttaattcattttaattcattttttaataatgaatggccaggtcagaagtcagggcactaaacaagctcagtcccaaagacttatggaacatttatgagtcctttgcaaaaagtaaaaagttcaaagaaacttttacaaaatgttattatttattaatttattttttggttgtgctgggtctttgttgctatactccgggttttctctagttgcagcgagcgagggctactctccaggtgtggtacgtgggcttctcattgtagtggcttctcttgttgcagagcaagtgctctggggcacccaggtttcaatagttgtggctttcaggctctagacctcaggctcagtagttgtgtcgcatggactgagctgcctcaagacacgtgaaatctttccagagcagggatagaacctgtgtctcacatcagcaagcagatacttaaccactggaccaccagggaagtccgaaagttaaaaaaataataattttttttcagcttgcatggtgaaaacatctaggaaatactgcacattaatcttcctcttggtgtcacaaagcaaaataagttgtaaaatttctgagaagtcctgaaatatcagtagctctgtacttttgtttaccctagactctcaattctagagtttctgagtcacgtttgactataaaaccctttcttcccatcagacctgttgggtgcttggtgcttttgcagagaaactaggcaacactgaagagggaagacactggcattgaatgcctgacatctacagaaaccaataggacctacaacttctcttcaacacctgagacaccagccttcatgttcatcacccgacctgtctctttcctcagttcgtgagaagaattctagaggtcattaagacaagctgacatcagaaacgatcagtcagcatctctgagaaccttgtccgtgatggcaccacagatttggtgtcatctgatttcagctttaacccaatttttagcaagttttgacaaggctaacttaattagcaagcagacgatggcagcaatgcaacaataaaaaagaaagaaggctcctttggatctccaaggtgatgacgcatttctgctttggttccaacttctgcttgccatgagtctgggacttggcattcacctcctcgggccagatgctaaattaagtttgaagacattcaaggtattcattattgattggggttttggcagcaacagagagaactaaagaagcagcagctgtggtttcaaaggtaccatctctaagttaagacttgccaaaaataacaaggaaactttccaggtcatctcctcttggagggatcaaagtcagctgccctgggctcttggcagaaacaatcaaggaaaacagtgctcccagtggccccatcgctccctgcatggaagaaaagaggagctgccaggttgagagttcacattaagtagcaataataagcctcttaagaagtggatggcaacccactccagtattcttgcctagataatcccatagacagaggagcctggcagtctacagtccgtgggttcacaaagagtaggacacgactgagtgtctaaacaacaaaaaaaaaaagagaagaaaaatggctctctctcacttgagaaccacatctgtcacaatattttggttgcacgtgactgaaaccttgacccagactgcaacaagcaaaatagaattaatttactcatgtcaacagaaattccagaagtcagcaggcttcaggcatggctggattcagaagccagataaaatcaccatggacctgcttctctctatctcttaactctgtctccagggctcctggctgtaataactaggtgcagatgtcataaactctctaagaaccttgtcctctcaactgtaaatccattaagctggaataactccaagaagcctcagcgaaagtctcagggcatctcattagtcattatagggtcccaggcttatccttgaatgagttactatagatggaagaatggaaagctctaaagatacaaactgtttaaaaattattacaaagcaagcaccacactaagagctttcctgtgtatttcttaaagcctttttaaaatcccaacatacctgtggcggattcatttttatatttggcaaaactaatacaactatgtaaagtttaaaaataaaataaaatttaaaaagtaaaaaaaaaataaagtgcaaaaaaaataaaatatacttttaaatattttttaaaatatttgatcttatagtcaataaaagaga

SEQ ID NO: 63833 - DNA, 1168 bp, Bovine  19866881516297
  misc_feature (1)..(1): n is a, c, g, or t
naaataattaaccttgaaaatggagaatagttgttctttccacggaggatattcgctggcacccaaaatagatatgaggacagtgtcagccagtatatgtttttcctctctttgaaaacagttttggaacttctttaatctggtaagatttagttggaatctaaacaaggatttctcaataggcgtagagagactctttagttctgaagtaacaaatacatgtttttttgtgtgtgttagctgtccttgaaggctcctggtgcataaaactcgtcaattctaatttactatgagtgacttgagatataaagaaagggtggtgtaaatccttggagcttttaagcaactcaagttcatccactcattcagcctaggacatttacagcttgtacttcaatcacttcatcaggaagctattttttaaatgaaagttaaaatttgaattgttgccatgcactgaaaaaggtaaccagctgagacactgctcacttaagaaaaatttgattgctcaaaattgtgccagttttccagtcatttttttaagtggaataaacctgttgatgtaatcacaacgaagcagagaaagaaaagattccaaattagtggtagctatgcaaacattctcctcatttcaataacaggtatcacagagaaaaaaaatggaaacagactattcagcgcgtatgcgattgaagaccaagacagattttccctaaggataaactcacagttcctcttcactataataaaacaagcttccatctatttttaaggtaaactgtttgttaaaagagtcattaaaacaaattccatcaacaattccaaaagctattagaattaaatatttagactaaatcttcaaggaccaaaagggagtatttgcaatttaatgcaaaaataaataccacctgacacaccagttatgttcattagtttgtttcagctccggtgcctctaatgaaatttaattaaattgatttggctacttaaaggtacagtatacgtaaggataagtctttcacagtatgtaccatcttttaagggctccccaggtggcgctagtggtaaagaacccgactatcaatggaggagacacaagagacttgtgtttaatccctggttcaggaagatcccctgggagagggcatggcaacccactccaatatgc

SEQ ID NO: 63834 - DNA, 1228 bp, Bovine  19866880431567
  misc_feature (1)..(1): n is a, c, g, or t
ncggtaataccagtgagattcaagattacttgcagcagctcaccggagccagaacggtacctcgggtcttcatcggtcaagagtgcataggtggatgcacggatctagtaaatatgcatgagagaggggaactgttgacacggctaaagcaaattggagctctgcaataattacagagcagacccagactgatatccccccttggggacaggatggcattgcagataatgacagcagttcctggaggatggacctggggtgactgtacccagttacagcaactgtttacttaaaattctgaaatattttaaccgcaataaacggggaagggaagtcaatggcttcttttgactcagtattaaaaatggaccaacttgcccaaaataacaggtctgatggatgtctcgggtttcttgtggattggccctttgggttcccagggaccatgacaagatatgcttaggattcactcactgacccaaaagatggtccttctctttggcacatgttcttacatggttctcacaagggtctcttctgagctgggctgcctctacctctaacgcctgtgtttctcaaccaagtgtatctcaggccccaaagcatgaagctagagttggttttctgctactgcttggaaattattttgttgagtttgacttcctagaatttgtattatgaaatcaacaggcattttgaatgtgctttttcaaaaggtgtcttcccaggccaccatctccaccccaccccatcccttcctgctttgaaagtcactgctgtgaaccactgccctgaaccctgacaactcacagatctcacaggaaatgttcgacggttctgtctgttctgtctctcaatccgagagaaaccacgtgaaaagttaagcacagttggtcttcactttgtgctacagggatcagaggtctaaatgtaggtgcggtgatcatacggcaacactgttaggtcagacggtgtccagggaatcctggacaagcatatattgtttagatgacacccagaaggaacacacaaacatttaaatgttacgcagaaaacctgcatccccctcccgcaaaaaatgtctgaaaacagccaaatttgggaaacactgttctggatgattttctctctccccttctcccccctcactttatgagaacttaagaattccttattgtgaaggattctagaattgcaagactgttaatttctttctgtagatgcaagt

SEQ ID NO: 63835 - DNA, 1788 bp, Bovine  19866880489894
  misc_feature (1)..(1): n is a, c, g, or t
nagcagtagctgtgttctcaactgtcaggcgtctgcgagtgtttcagggagacacaagttttccctctgtgaacctgtgcgttttggtgtttactgagcacgaacataggcactgactggactgcgcagtgctctgtccagaactcaccccacctctgggaataacgcagaaaccatctcagaacggtggcccgatgtcctgagcatccctgcctttgtcccagggctgatagccagctcagccccaggctctcttgctcctgagacggtgggttctctttcctgtgatcagaagcaaaagcgctgcaaaccgacgccaccagctttcagtcttcacgcctttactttctctcttctccgttctggttaaacgttttttatttctgttgccaagcatggctctggctggaagaactaacaaaatttacaagtgcccccaccttaaccgtcccctcgctctccctgcaccacctctgccaacctgcccagagcccagcgcgtggctcgggctctcagagttccccgggaggccacggctgagcaccaggtttcaggtgatgtttctttgcaacccctcgtgttcttctgctcaactgaaaggaccacgtcccggcctcgccccgccgctcaccggtccacgtgcagtccccacgtcctgtccctctgccgggcacagcctccactgcccctgctgctcctggtctctgctgcctgggacccatcccatcccccccgcctcggctcccacctcctcctgaagcggtttctgccccccgtcagggtctgcgtctctctgccttgaaggcgtcccgaggtccaggaggcagcgtcccaggttctcaggggcagcacacagtgaatgggagcagcgtgcctcccaccaccagcccctgctttctgccccaccccggcccccccacgctccagtgcctgtcggcccccagtgcggcgggctgtggcagcgatggccgtctcctagctgtgaccccccgggcctgcttcgtgctcagaagtggctcagagagacagcacagaattggagagattccaaggaccgagaaggggccctccctgagcacagggtatgaaggctcagggacttgaggtctgtaggggccagagtgacagaggcgggctgcagccccacatgagccatgagactcagcctgctcatttctttgggcttccttcttctccgccgtgacgggggcgatcatttgagaatgaagagtggttacgtgtgaagtgtttacagcagccccaggtacttagcaagtgctgggcccaggtcatagttcataaaccagcatgtagacaaagccgttcagtggagggcggagactgagctttaggagaaccgaaatcttgatgtcacacccatgatggcgcagtattactttttccccttccagaacatcctccacactctcacagtcagcccctcgcttctcaagagcccatccctcttggccctgcaaggggtacactcctccacaaagcttttccaaagcccccagctggaggcactgaagacaatatgcttcaggaaaagcgagagagccaccttcctgtaactcgcttccttgccaatcagcgcatctgtgatgaaaggcgctccttccggaaggttcatctgcgctagtgttcacccaggaacgtttgcctagggttttactgcttgaggatgctactcggttagatgcaactaaaaacataaattacatctcaaactgaaacgtgagcctgcttgttctctgtgattgagctaagctgctaagcctaatccgt

SEQ ID NO: 63836 - DNA, 2160 bp, Bovine  19866880841197
  misc_feature (1)..(1): n is a, c, g, or t
naaagaataaaatcaagtagacccgggactgagtccatctttgctggtattttgaattaattttcctcatcagtgctgggaacacagaacagcaattctacaccttgttttgggggagccttatgctcagctaattaagtagttcacaatacaatctgatgcttatgtcggtgaaccgcagtctagaaaagtgtgggctttgaagccagatggacctgctcctcctgctgctggctgcggggcgaggggcaagtctcctaagcctccgtttgctcgtctgtgaagtggggatgtcatccctgagtgctgttctgaggatccaacacaaaccactgcttacggtttatgtgtctggtgcagtgaagggctcaacaaatttaactgttagaatctgggcgcctactgagagtgtctgcccactgaagacactcagcatctggtgcaaagtgggtgccagtggtggctgttgggtctccctgccttttcagagcatcctgatgctcccttaaagacaaagaaccgaagacgctcaagtctgcaaagcttgtttctgcatcccgcccattttcttccctcccaggcagattttccggctacttcaaaatgctccctttaacgtctgtctcccacacttccatatcttctgcctgccaacctcagtattttaactgtggctttaccgcatctgtttttaataacctctgttcaccagtttaaaaccctcttctctcttcatttaatatcacttgttggagaaaagaaccggaagggatggatgttcgttagcatcgggtcctatctcctccccaaacacaggattatgagagtctagagagttttcacagaggagtcatgaaaattcacaaaaagcgtctttaaaaatggagttctctttcccacaatgaaattgactttattttgaataactcttgccagtgtttaagtgatgcaattcttaacttcactgtttttcttaccaacttccactcgtctctcagccctggaaaccccaagactctcccttagccctttcctaaacctcatgttcctaaatcatctgcagaagcacttcaccccacccaagaacagggtattagagtgcctaataccctttatgagtcccttaatacccataaataatgaagtatttatgggacaatcactttggcgggggtggcatcccaggtttcagaatgatctttcccacagacacttgggcgttatccaaaatcagcatggccagtatccaacgagacctcggaggcgctctccgtttcactgtgccctgtcagctgcatactgtatagagctcgatgcatttgtaattactgagtttcctttgaacctgtcactgttcaccatttccagttagtgggtcttaatttcccagaggaaaacctttggctggtcacaaagttcaacctcatttattacacagctaaagaagaaccacttctttgcctactgatgggggatgaccagagagaaatcaacaagagtgggatccagtctccacccatcccatcgggagaggcttgactgctctgtgatcagactggaagcagtttctaaaaagcagtatcacacaggacacagctctgcagctctttcctaatttcctgataaagagccaggtgacaaggtcacttggttcttacgtctcaaagaggcagggcggacctcagctcttaggtcggtgacgaatggcgggtgacactcaggctggacggggtgggcacagggagcacccacggctcttcttcagccagtggctggcacgtaggaaagctgacccagcacggccagatttctcatcttccaagagaaatcagaaatctacactttggctggaaatctcatttttaaaagttgaccgctgctttgagtcttctcaaacaccccacagcccatgttagcttcctggaactggctgctacaggctcataggagcatatattctctctacacctgctttcagtgaattcacgttcatagcttgaaacgttcgtggccatttagggaatatttacatcacagaaacaggcaaatgctgcaatgcaagtcaggctcttgtttctttgctctttaagctgccaccaaacatttctcagcacatctccacctgtgggccaaacaaatcatgggcacctctggccaaag

SEQ ID NO: 63837 - DNA, 1377 bp, Bovine  19866880158639
  misc_feature (1)..(1): n is a, c, g, or t
nccagtattcttgcctggagaatcccatggacagaggagcctagtgggctacaatccacagggttgcaaagagttggatacaatgaagcaacttaacacataacacacaccattaacaggtaagaacaaccaatgcacacttttctacagatggatttacttcactatttagaacctgatatacccagtcaagggtggtgggaggtgggaagcccaaccaacccagcactctcctcctctcctttccactagctctcaccctctaacatagtttaatgtacttatttgtgatgtttcttccttgtctccctccatttaaagttccctgagataaggcagtgcccggcacatagcacgcactcgagaaatattcacagaaggaagtcgggagttgctctgtgcccagtggcgccctgagactgcttgtcctgggcctgtggtggacacagaaatcacgagccaatgtccagacactctgagagctgccgggcatctaaatgcatggtcatttttcctgtggttcatctttatcgtattttacaaaagcatacgtcacatgatggattggaaatgaaaaaacaaaacaaagcaactggtcctttgccacaggtggcttgagaagcgccagaccagcagacaagaggtctgaaggcccgggacacaggaaaagtgaacttcttgctgctgctgctgctgctaagtcacttcagtcatgtccgactctgtgtgaccccatagacggcagcccaccaggctctcctgcccctgggattctccaggcaagaacactggagtgggttgccatttccttctcccatgcatgaaagtgaaaaagtgaaagtgaagtcgctcagtcgtgtctaactcttagcgaccccatggactgcagcccaccaggctcctccatccatgggattttccaggcaagagtactggaatggggtgccattgccttctctggaataagtactgggtgatgtgctttaaactcaggttgtctgcttcaagagggtgtgctgttttcactgctatggattgcctccaaagggtttatttaatatttattacgttacttacatggactagttattttgtggatcacaaacctatgcccagaggtcataataaaaatgaggcagagttgtaaattattgatacatttgctttgagaaaatattatttgctatcttggagcagattttactgtagctcaactggatgagtgaaagacagaatcagtgggtaatgggcttcttgtgtgtgctcagtcacttcagtcgtgtgggactcttcgtgaccccatggactgtagtccaccagctcctctgtccacgacatttcccaggcaagaatactataatgggttgccatttcctc

SEQ ID NO: 63838 - DNA, 2808 bp, Bovine  19866880426189
  misc_feature (1)..(1): n is a, c, g, or t
ncaaacaatttatactagtgaaaatacaaacagcaaaatggtatatacatatgggaaaatattaagtcaaaagtcataaaaagtcaataaaacaacaaaataacatgtttggactatgaacttatctaaatttaaaaaacatgaataataattcttgcaagagtattttctcataaactgctatggaaatgttaatcacaccgtcctttggaaagtagttttccaaagtgtgttgagaacctgaaaaatagtagtattttttcactcactgatagaaatttatctaaggaaataaactgaaataccttatgcataagaatgatcctggaaacacaaacatacatttatattactaatagcttaaatggttaacagtaagaggatggttaaatgagatgagtgattatggaaacatttaaaatgatgttttcaaagagaatgttatgatttatatgaaaaagaaataggtaataatgtatgcatatagtttggtttcaattatgcaatgacagcacatatacaagatagattagaagaatgaataaaagatattaatggcagaccagtcagtagccttgcttcaatatatttacagtagcaggatcatattgttgctattaaaatttaataggtttactttacaggagcaggtgttactgcccatccgtgatgataagaatttgattgaacaataatgtcttttctgccatttgttaactggctttggaaagcagctattcactctctttccacctcagattcttggactcttatgctattagcaacaataatacctcagtctcaaggtcattgaaagatagaataaagtatgaatgtggaaagtgtgctgtaaatggcatttatatgttatagttttcattaaataattataaaatatttaataatttgacaaaaacttgataattccataattatcaagtatcctagtcctgcatgggtctatggctcaattctactgccacagaatcagtcatactaataacttcatggccacctttgagtgctattcctgtaaagtttgaaaatccaccagtggtacagatttgtctgtcaacatcaaatcaaagttatattcatgtcagcaagttattatacacagaaagagctgtcaggttgttaatatgaaaagcactgactaatttataaaactattcagttgaaagataatggaaaggcaagctgccaatgtgaagagcaatgtgcaaatgagaactggagcctaagacctagaaaatttatcagagaaagacttgaaagattttggtgtaaaagacaaaaatgacagacacaaaactgaagggcgtcagacctttgagcaggctattttgattgaataattatttttagtctttaaaggaatctttaaaaggaatgtttttcattgtctgggtacaatgtgttaccaataaataagggaataaaacccagagaggacaaaagaagaaggagcggactcaagtgcagtgtgagaaaccgcctctgtctagaattctggagcttgtagactgtatccacggatggggcttggatcaccaccttctttaggtgagtcttgagataagtcttttctatatccccatttcccttgccatggttaattgcccctcaaagttaaataggactgcaaaacagagcagaaatacgaagctcacaatagataattacagtgtaagggcaggaaaggaagaaaaagaggtagagtaagtagaggtatgtttatacatttggggaagaaaatgtcagcgtgcgcacttgacatcacactcctccctatggtcaaatggacacaaccaggcacctgctgtaactgttgctctggtttccggtgtaagagaatcatcttctctatagccttgttctccagctaagcatatgaatggccaaaatatctggttagcatggctaattctattgaggctcttgccaactaattttgaaaaaaaaaaaaaaaaaaaagcccaaataattaactgacaattaactgcatgtatcattggtcaacaattggttgcacttcttttccttgaatctaaaatcaaagtaacttaagagtgctggagtagtttatgcttaatctcctccttgataccaaattccctacatccaataaattttactatttactctttaatataaaagcaatacattctcattaaatttttacaatatagagaagtagaaaaaaatggttaaacattatggttctgttacttaaagctccatgatttttcatatgttgtatttctatttgtatttttgcatatttatgcttagcagtataatttatactttttatttaataatgttactatgtgtttcttaaatgtatatcttaatgactgtgttgtattccctctggttggtggtaccattaacactgattcactgaattattcctcactggatcactggttcagtgaaacagtgaacactggttcactaccatatggagctagattgtcctgctgctactatgatatatacacacagggctaaaaatctttgtatataactcttctatatggctgtaattattaaatattttcttagggtttatttcaaaaagcagattattttctaattatttttgctaacagttgctatctgaatcattctaaaccacattactggtctatacctcagaaactattagataattgggtgtgaaaggtttttaaagcctgtaaaatgataaaatatatccttcttattccaaagccagcaagtgtttaagaaacattagcaccattttcattaaagtaaacaataaaacataagtatcactta

SEQ ID NO: 63839 - DNA, 746 bp, Bovine  19866880449042
  misc_feature (1)..(1): n is a, c, g, or t
naatccttatgccctactggcttaagctctgagccttattttctcctcctaaaatggtgacaaaaacagcacgtatttcttagggttttccaataaaaattacttgactcaattcatatgaagaactaaaagagtattctcgtgttttaagccctcaataaatgttagccatgattattaattaaaatatatatatatatatatatatacaataaaacaacaatatggactttaaaggcagatctaaaattgtttccaacagatgtgcttttatgtgcttcgcatgcaacttcctggcaggtgacaaataacaataaacttaattaaggggtgacttttctggtcagtataaaggacagagcagttttaatcctggcaagaagcagagtctggaagcttttcatatttaatcattttctttaacatgaataagtcgagtgctccattagttctggagaggagagtataatagaatcagttctataataggggcattaagccctcctgcattataggaaattgttgaaaaaggctgccaggctctgatttccttgccaaaatagggctacagatactcaacagtaacatccatcctgattaaaaaaaaaaaaaaaattactttaaatagcaagaaattcaaatggcagcatagaatgggaatgtcagttttgagcaagagtagaaatcaaaagctatagacacactccgttcttaaagcaggtgcttattagcactatcgctttatt

SEQ ID NO: 63840 - DNA, 1761 bp, Bovine  19866880449486
  misc_feature (1)..(1): n is a, c, g, or t
natcattccccaaactaaccattagcacagagctaatgattaagcaacatttataataataatgaaagcacattagaagaatgtgttgacatctttcaaattttgacagctcctaaaaaataatttttattttagcttgtctaattaaatggactacagttgcttggcactgacctaaaaatctgactaaaaattataagctcataattgtatgaaaataaaagagaagaagaaatagaagagcataaaaattataacacattaaccaagttcttgataagtaacataggtttcacattcaaaaccctagttctggtcactggtcttggctctttgccctgaacctgctcaggtaacctccaggtgtgaggcagaccctggttaccaaacagcagttccctgaagtcatctgccaacaagccttgactttggagttctggctgccctagaattcccaggagccctgttagaacaccctacctcattaccttgaaccttttaaaggtaactacttctctgggctatgatatgttgatgcttaccctccttctggcccacaacccttgttcatctttaatcaacatgaatttcacaatgtggacaatatttctaacaagaatttcacttgcgcttgaaatgtcctacctagtggcatcttattcccccagatagattgttctgagatattaataaaccaatcatcaactatttttgcccccttagctcatcattagttaacttcaaaaatacaaaagaatttgaagttacctattctctgaaaatttaaaataaataaaataccatatttatgcacaagaaaccatgaaaagaatatagagcaagggtaaaaagttgcgtgtgtcctccaaatataggataattttttaaaagaagctgtctctaaacttcctgcatataaacattgtatcttgagtttttgagaatcacatcctagccctaattctgctctcaaactaaacagaagaccttacctaaactgctttgcctctcagagaccccgtttgttaaaagagagattgaattaaatcaatgttcctgagtagagaggggatatgagaaccatcataaagaatttctaaactcatatcatccatcttattgtctagagaattcagacatcatctgccttatatctccacatgagagcacagcagaatatgggagacctgggcaaatttcatttgaaacagcatccccatgtaattctattattgctccctgccttcaattgccactgacctgatggtcttcaaggacttctctatttcccacattctctgtttccagaaaaaacagcactaggacttccctggtggtccagtggttaagaatccacctgccaatgcaagggccaggagtttgatccctgatccgggaagattccacatgctacgggcaaccaaacccctgcgccacaactgccaagcccatgtaccttagaatctgcgttctgcaacaagagatgccacgaaaatgagaagtccatgcagcacaactagaaagcagcctcagcgccccaaatcagagaaatcctgtgcacagcaacaaagacccagagcagccaaaaattaaaaattaagtatttttttaaaaaagaaatacacttcttaaaaaaaataccatactggaaaaccttgatctgtacccttgatatataagaaggctttaagtaggcagaggcagttattctcgagcctttgcgcacataaaacttttgatttagagagcatttattcagta

SEQ ID NO: 63841 - DNA, 976 bp, Bovine  19866880562019
  misc_feature (1)..(1): n is a, c, g, or t
nttccttaaaggccagggaagtgtcttatcattctcttatatccagctggaagaagtaagcccctggaccttataaaaagaattttacctgtgaaattaaagttattgagagatggtagctgtcatttaccttaagctcatcttcgctcaaccaagctgacctttcatgtgtttatttagctcagatgtgtctctactcagaaagctcaagacatatttgctttgtacctagaataaagattaagtatatataatcactgagcatttcctaggccccaaggtagaacagaaactcatcagatccactggacagactcttctctagggtagtaattactgactattacaccgccaagactatccttgtcatttccttctgtagaccacatgatttgaaaaattttgtctacaaacaggcacatattaaggaataatttattttcttttttcattaatctaatagatgcagctgtcagtagtcagaactctggatagattgagataaatatattacaacaatggatttgtacaatcccagcccaaagcaaagaatcttaacattttaattagtctgttaatgctattatgaataaacgtgtcattcctattttatttttagagacatcaaaaatagctcataaatcctcattactatcctgggagctactagacgaggacaaagctcccagaccatccatccctctttgattacctttatccctcggtatttctcttttctagtgccagattgtgaaataccagtgaaacattctggcgcatcaaacaattaatgccttacccatgtcattgtctaatatttcatgtcttcattcctgcttcccaataaagtattaacatgggttcctaaagtggtaacacccctcacccctagcttggccctgatgcccctgtgcttgtgtacaagacagcaaaagagacactgatgtatagaacagtcttatggactctgtgggag

SEQ ID NO: 63842 - DNA, 834 bp, Bovine  19866880662487
  misc_feature (1)..(1): n is a, c, g, or t
nattactgtcctcaaagtgccacaatgccagtaataaaatattcctccttgaaaaaagtcttttgttcctttaaattctaaacaattgctgcggttgctacttgattttagcaatatatctgcaagctacaaattagcacattttaattcttatccgatattcacaaacattgtcttctacatgggggaattaattcaaagacttccttgttatgtattcatcccttgacacatgggagctcagcctcatgcttttgtttcaagagtaagtttataattgttcggaattacttgaagtacactggtgcttgagttcttgtcttcattctttatgatgcaatttttgcatttaaacagtagattagatataacaatgctagcataatgaattgtgaaggtgaagaaacagaacttgtgttatgccaattctgtcatgccatttgacacttggaaattttacatttgtgttttaatttaaaacagtgggaaattaagtgtgaattttagttcatatctgaaatattttactcagtttgaataaagttttaaaacattttttttaaaatttcagctttattgaggtataattgacaaaattgtaagatatttaaactgtacatcacagtggcttgacacaaatagacatcaagaaaggattactgtatctcattaattaacacatgcatcatttcacttatctatctctccccgctctctctcctttttttgttttgttttgggtgagaccatctcagttccgtcttcccagcaaacctcagtcatacaacacattttatcaactagagtcaccacattatatgcggctcctcagat

SEQ ID NO: 63843 - DNA, 2639 bp, Bovine  19866880690008
  misc_feature (1)..(1): n is a, c, g, or t
natgaacgcgtgtgtgtcaagtcacttcagtaatgtctgactgttcacaaaccccatggactatagcctgtcaggctcgtctgtccatgggattctccaggcaagaatattggagtggctgccatgccctccttcagggcatcttcccaatcccagaatggaacccttgtctcttatgcctcctgcattggaaagcaggttctttaccactagcgccacctgggaagctaattatgaatagtcctatacaaaatagatggggaaacagtggaaacagtgtcagactttatttatgggggctccaaaatcactgcagatggtgattgcagccatgaaattaaaagacgcttactccttggaaggaaagttatgaccaacctagatagcatattcaaaagcaaagacattactttgccaacaaaggtccatctagtcaaggctatggtttttacagtggtcatgtatggatgtgagagttgaattgtgaagacagctgagcgccaaagaattgatgcttttgaactgtggtgttggagaagactcttgagggtcccttggactgcaaggagatccaaccagtccattctaaaggagatcagtccttggaaggaatgatgccaaagctgaaactccagtactttggccagctcatgcgaagagttgactcattggaaaagactctgatgatgggagggattgggggcaggaggagaaggggatgacagagcatgagatggctggatggcatcactgacccgatggacatgagtttgagtgaactctgggagttggtgatggacagggaggcctggcgtgctgcgattcatggggtcacaaagagtcggacatgactgagcaactgaactgaactgaactgatacaaaatagagcacttgcctttaaatgaaattatttgctgcattttatgatgtgatttcatcatatccatgtctgcctttttacttataacaaaactattttggcttttaaagaagaagtcaatgggaaataaggttaacatttttgctggaatattttgattctgtatattgaattaagtgatggggcatcagtattaggctaaattcctatttgaatcattggcaatatgactcttttttcaagttagcaacctgaacacccataacctgcaaccatatgtactttaaaaatattttctcgaatgaattgaaatgggaatctgaagattgtcagttttcctttcattacttcattatcgaatgatctgggataaggatgtcctggggctttagtttccatgtttttaaaccaggattagtagtgtctgcacttaggatttaaactcaaatggaataatacgttatcagttccagcaatggtgaatacgtaggtaacttggattatggtgacagcaataaaaaaggtcagagacagctgtggggcagaaatgaagccttccatgtgactgtggaaaattaattcatctttcaaatatttctgaaagagtagttatgagttaagagatctataagaaatgaagaagggaagcagacagatggcagccctttgctcctggaccagggttcttacgtaagacctggtgaaacaggattcagaccccaggatggccagactgtgctctgaggaaccaggaaattgggagcatctggttaaagtgatgaatgtgtggggaagagaaactgaagcttctggatggcagattttgaagcacaggtgctatcaactacattatcacccaaacctgaaaacttgaagctaaatatgcacagagctttggtacatgacatatggtgtttcaaatataaaacttatagaccatctgtcagatctagtggggctttagtctggaaggatgactgaagattggagaacctgctacatttgcacacccagaagtaacttgacaatacatattaatttactggtcatcacagataaagtgtagtttctgtagagagttatagggaatatggtctggtccttaaaaagataaagcaagacaataacagaagggcaggcagagtgcatggctttacattgcttctagttcttaagcttcgatttcatggtccatcatcacgattactcttgtgcatttgccgtaaatatccttgtcttccttggccccttacatgcttggcaaagtcacaaccctgaaaaatagaatctctctgcctttccaaacttgcaatcatgcaactgaatatctctggagaaaaatacacggtcatgtcttgtcttactttaaattcagggctgtaaagctcagcgggttcttgaaatggttagagtgagagaatgaagtcgctcagtcgtgccgactctttgcgaccccatggaccaggctcctccatccatgggattttccaggcaagaatactggagtgggttgccatttccttggttaggctattgaattatccatcccctgttccttccctcctcactcacctagcaggactctctcctttcttctctgctttgcatccttgttctcattcccagggatgaatctttatttcactgagaagattgaagtaatcagaggagaatgtcttaaaagcccacatcccagttacctccctaccaacacctacatccataccctcagattccttgctgttcctattaagcat

SEQ ID NO: 63844 - DNA, 1555 bp, Bovine  19866880692458
  misc_feature (1)..(1): n is a, c, g, or t
ncactgccctgctcctggcatctcctctctatctgtcttcctggctaatcttgaacatggctcttctctctgattctgtggtgttaccatagaggcagacccggaaagatcatttattttgcttggttatagtagaatttttattgattagtttcagacaaaaaagtgttatattacataattactgactgtgcttttaattttaaaagttcttagtcttaaaaccatgtgatggagagcaggaggaaggacagatagagtgtgtggactggggtgatacataaagacatctgggaaaacaggaggaatgctttgccagtgtatagcctgccactgtctgcatgtaacaagggacatgtgtgctacctggagacagcaccagggagagaggaagggagatttccaccctcttaggtagttaaagtgataaacatctctgtcaatttcatgtcccacagaattacctgttactttgaattcatttaggatagtgcttttacccctaataaagataattttggtgatatgttgttaacatatacaagaataaaaagaaggaaaaaatgacagataatcttaccatccatagataatcactcatacattttaggtgcttctgctgtagagaagtagcttattgaaaagctctttgggaaggaatttcatcttcaactggactaatgttaaagtatcatatttctatcatacttttactctctatatatttatttaaagtgggatttctgtgaagtgaaagtgaaagtcactcagtcatgtccgactctttatgaccccatggactatacagttcgtggaagtctccaggccagaatactggagtggctagcctttcccttgtctaggggatcttcccaacccagggatcaaacccaggtctcctgcattgcaggtggattctttaccaactgagccacaagggaagcctgggatttctataggtgacatttttagttaaattatttgattttgttaacttgtaatttttgcgtttatttaagtccaggaacttggcagatctcttattaactcttcagttgatttgagataattcttaaataaattatttaaatttcataaaagatttttttacttgaataatgcaattatgagttcagagaagatgctgggtaagtatgagaggagattgacaaagatgataaatatgaaaaaaacttaaaaacaattcaaatatatgctgatttacctagtattcagagatgtactttattaatattgatttaatcattgaaaggtctcagtattatttttaactttacttataataaaaatggatactttacattttaaaaagcacatgtggatatattacttcatttaattaatactagaacccatcttggaaggtaacactcacataactgatggaaactctgggactttcagaaattaactccgaaatttacatagttatgtgatgggcaacccaggactcagacttgggactctttaaccaagtcttgtgtgctctttatacagtatcacagataagaataaagacataaatcacttgaaa

SEQ ID NO: 63845 - DNA, 1347 bp, Bovine  19866880752088
  misc_feature (1)..(1): n is a, c, g, or t
naatgtattatgcccatttatttctaaccaaaataaattgtttcaatttttagagaaaaaatatatttgctatggaagttggacattttaaaatattgatttaatgtggtgtcgaatttccaatagtaagggtatctgtggtttctagggctcttaaaataatgttttggaagctagctgtcttcattttccctatttgtatccatgacacagctattaatctttggacagttacatattattaaaatatcttccaattaatgtcttgtcctttcactttctttcctggttaatttacacggaaaagaagcacttaatttgatgcattcagttttattaatcttttcttgtacattttgtttcttatgtgtttgtttaagaaatattttccatcctaacatttaaaatagcgtttgatatttttctcctaaaagatttacagctttgcctttcagaaataagcctcatgtgaggtaagactcaaattctatttctgtcagcatgataacaaattgttagacctatattctcactgactgatgatgccatatctgttgcattatcagcatgtcataaatgcagattctgctctgggctctcgatccttattcaggagttactttctctatgaagcataaataccacttcattaaatgctgcaaatgcagactaagtcaatatcatagagagtaagttcccacaccacattcttcaggcaagttttggccatttttcttttcctcaaatttttagaatcagcttgtcaagcttctcaaaaatctctattggtacttttattaaaattgtgttgaatctctagcttaatttgtagagaacaggcatcttctgatgctaaattttctaattcactaattaaatatctttatttattctattcttccttaatgtctttgaagaagttttataatcttctctacaaaatcttatgcagtttttgttagatttattcttatatactgttatacttttgtgctattgcaaagattatttttgaagtacatttgtttgttgatagtgtataaaaattcaattaacttttttatatcttacagtcagaaacattgctaattaattctactaataagtctaaaaacattttgaaggttttatttagataatcatttttttacaaataataattttctttcttcctgctttgtatcttttattatttttcttttgtaatatcttggctgcccttaatgtaatgaagatagaaaataaaataatcttaaatttctttggaaaaagcactatttattaaggatatatgatcgtactgttcatagtagatttagttcagagcatttgctcaggatttcttgt

SEQ ID NO: 63846 - DNA, 1191 bp, Bovine  19866880845979
  misc_feature (1)..(1): n is a, c, g, or t
ntctgcttgtctggggcaatttttagcaccctccaggacacatactttcttctgctagactcttacctcatcagtccttgtggcttggaaaacacttcgtggcctacctatttcagtggtaactgtttccttctatacatttcattaaatgctggtttcaaagtcccccttttctgtgagtctgtaaaaatcctggcaggggaataaaatcagcacagctgcctgttaacttcagtatgacaagaatagttcctaattaaactcttatgtctttgatttaaaactccatttaatcaaattattcaccaacttaaggcagttgttgattacagggagagtataccttgaatctttgtgagttataactcccttccaggcctcatcaagcttctctaaaggggtacaacttgtgccttcttaaggagagctgaaaatctttcaacagctcactccttcctccttgaggctctttcttaaatcatgaagggtctggctgagttccaggtgtagactatcattcttgcttcctgtatatccagcctgatttcagggcctgcaatagctactgaatggtttgaggatggatataaaggccactagacttccctggtggagaaggcaatggcaccccactctagtactcttgcctggaaaatcccatggacggaggagcctggtaggctgcagtccatggggttgtgaagagtcggatacgactgagcgacttcacttccacttttcactttcatgcattggagaaggaaatggcaacccactccagtgttcttgcctggagaatcccaggggcaggagagcctggtgggctgctgtctctggggttgcacagaatcggacacaactgaagcaacttagcagcagcagcagacttccctggtggctcagatggtaaagaatccgcctgcaatgcagaagacctggctttgatccctaggtggggaagatcctctggagaagtaattggctacccactgtagtattcttgcctggagaattccatggacagaggagcctgttgggctacagttgatggggtcacaaagagttggacatgactgagcaagtaccacttccaccacttttcacataaagaccaatgcctctaggttgctaggaagctagttgtaacaagcaggtgagatggcccagaggtacctgatggcacttcactta

SEQ ID NO: 63847 - DNA, 844 bp, Bovine  19866880898181
  misc_feature (1)..(1): n is a, c, g, or t
nctttggcatagtcaataaagcagaaatagatgtttttctggaactctcttgctttttcgatgatccagcgaatgttggcaatttgatctctggttcctctgccttttctaaaaccagcttgaacatcatgaagttcacggttcacgtattgctgaagcctggcttggtgaattttgagcattactttactagcgtgtgagatgagtgcaactgtgcggtagtttgagcattctttggcattgcctttctttgggattggaatgaaaactgaccttttccagtcctgtggccactgctgagttctccaaatttgctggcatattgagtgcagcactttcacagcatctcttagtgtccttgtaaaaggaaacgcaagattgcttgtgctgtctgtcacgtggagacacagtgagaaggggctgtctgcagaccggggacaggggtttcaccaggaactgaattggttggcatcttgatcttagacatcttagcctctagacgtgtaagaaaacaaatttttgttgtttaagccacccagtctatggtactgtattctggcaccctgagctaacgcagcatccatgctcctttttagaaggaaattgaggctcagaaatatgactttaccctttaaaaatggaaattagcttttaatcaggaaggtgcttactagctagatagaagacttctgtcaaggttttgacatgcagagagaagataagactcctagtgctaatcaacttttaatttactttcttgttacacgcattaaggtacttttagaagactccctagttccaaatgtttgtgaaacgttgttgaataaattacttaagtcataaa

SEQ ID NO: 63848 - DNA, 1395 bp, Bovine  19866880924776
  misc_feature (1)..(1): n is a, c, g, or t
ngtaataggaataatcacagttgcctaccttatagaactactgtgggaattacataaaatatgctaagtatcagcatatgtaggtatgttataaatataaattacatcaaatataatgataataataatatcaaattttaatggaagcagtcattaatgtataactcctgaatagtctattttcactgaatttctggtaagaaataaaagcccaaataaacaattgaaaaatcctaaatggtttttagggtagtacaacaagccaacaattatttccataatttgaaggttggtgcttaaatgtatgtacttactctgccttttcagataaagcctctctagtttctcctcaaatacttctatatgcaagctgccccaagacttctctgaagccggcagacacaaactgtgtataaggatcactactgcaaagttgcttcaacaaatactccatgctttgctcttcatgtaattttcctggattttactgtattaggttctatgatattcctgtatttgaagctgactggttataatcactgatctctacaacacaacaatgtcctttcccttttcctaccagccctctcagaatatagtaacagagtctccaaaatgtaatacataccttcttattttagaatttctaaattcttattttaggacaaacttggtttggttttcaaacttggatgcatgttggaatcacacgaagaactttataaggtacctatgcctagatcccacccccatagggtataagttacttgacatgggctagagcctaaatattgggaatttttaaagctttccaaatgactctaaagtacagtcaaggttgatcatctctgatggagggatttcatgtggctgcagagatctgaagcctggaaccgaagcattcctttctctgggtggcctcctagagctccccaaagtcgtgttgtccacatgtccctctgttccctaaaagtatctcctttatagcatctctcatgattatttgcttctatgtacctccttaattctgcactgtgagcttctgagagcagtgatcacttttctctcattcccaacacctcacagaagctggcacataggaggtgctccaggaacacatgtcccatcaaactgaaagagtttatcccttctacctctctgaccaaagtaaccaggcaagagcatctctttccagaaagccagactgagatgctgcacatgcagcacctgaagtatcccccagaggaacccctccactgaacctgcccctcaccaggaagtcagagacaggcgtgcatagctccatagctgacagtttataacttgcaaagtgttctttctggaggctcaagagtgaatgtaattaaaacctctgcgtattacctcttccattgt

SEQ ID NO: 63849 - DNA, 1123 bp, Bovine  19866881278622
  misc_feature (1)..(1): n is a, c, g, or t
nagcgatgtagctcctactttgcctgtgttccttttagaggaaagcattttaatgaaagctgcagtattctaagaatgtaactaccccatcacatgagattgttctgcactgttgcatgttaaaattaatcattgtgtgtagcacttattgtatatccgggagattactctgtagatccatatttagttaggcttattgagtttggctcatattattaacattattatggaactaataatggatgtatgtttcattttccattggtagggcattctagttataatactcaagtaatagctcaagagatattttcaataaaatgtcccatttatagtcactagtggaaaaataaaacactcactcctctggcataaaaatttaagtttactaaaatgagtttaactcagtgactgaaagaatactgtattgagtcatgtcagctaaatctttgaagaaaaggttagaggagaaaagaactcaagtttgggaccaggacctattggtgaagaattcaacttccaggtaatgcttagttcagttcaattcattcactcagttcagttcagttcagtcgctcagttgtgtctgactctttgtgaccccgtgaatcacagcacgccaggcctccctgtccatcaccaactcccagagttcacccagactcacgtccatcgagtcagtgatgccatccagccatctcatcctctgccgtccccttcttctcctgcccctaatccctctcagcatcagagtcttttccagtgagtcaactctttgcatgaggtggccaaagtactggagtttcagctttagcatcattccttccaaagaaatcccagggctgacctcctttagaatggactggttggatctccttgcagtccaagggactctcaagagtcttctccaacaccacagttcaaaagcatcaattcttcggtgctcagccttcttcacagtccaactctcacattcatacgtgaccacaggaaaaaccatagccttgactagacggacctttgttggcaaagtaatgtctctgcttttgaatatgctacctaggttggtcataactcagttgtgtccagttctttgcaaccccatggagtgcagcatgcaagg

SEQ ID NO: 63850 - DNA, 1236 bp, Bovine  19866881353989
  misc_feature (1)..(1): n is a, c, g, or t
nctgctgggttctgtgtgccaggcttacagtcagaaattaaattcctttgacaaaaaagaagaaataaaaatcctcctagagtaaacacacagagaactcatatctaaatcctgcaaggctggctaaattctaattttatccttttctactacctacactactctttagagtggggtcaggggtatttattactttagtttatgtgcaaactttaattccaatatgaaatcaagtgaagttatttaaaaatcaaagctgatgttaataagatgatctttttcatcctcccaaaagaaactaatgaatcattgtgaatttattgtggtagaaagacagtggctgctggcaattatactgatgagcagaaatcctcacaagtgggtacttaaaagcaattattttccatttggttctaaaaaagcctctgagtacaactaagctttgattacctggcatctgaaaatatacattctcagagggatatttgtgatgattattttagtggaaagaaagtaaacagctactgtttgtgaaacctcagttgtgagcctctttaaagtttaaatatgaatcgtgcaaaagatggagctctgacttaacagactagcacaatactattacattatgttcccaactagaaagagtcaagaatttattgggtttctgaggatcaaaacgctgtttgaaatgcattctctcaagaacatacttcttccaactcaaaagccaatggcatttttaataacagactctccagccttaggaccaaaactcattcctccattttttccttcttggccccaggttcatgaagaatgttgtatcaaaaagtgacaacgcagaggtcactggaacaaaaattgatccctccaagagacagaagccaaaggccatccaaagagggaatcaggtggagtattttgtacttgatttatttttcaagtacagaaaggttgtgggttcttatgaagaggtattaccttcttttctgtctaattcaagttcattggtattcaacggaagccaaaagaccactttttaaaaggagaggagaatgtgtacccaaggttcaaaaccataagaatgagtattcagatttgtaaactcagctcataactccaggtctggagattgtgagtacaaatacagattgaaataatgaactttttcacttgtcttttccccaaataagagaaatattaaagaaaatactgatgatgcaatttcagtagaat

SEQ ID NO: 63851 - DNA, 855 bp, Bovine  19866881383768
  misc_feature (1)..(1): n is a, c, g, or t
nttacctcttccttgtccctggtactggtccctgcctgttgttcagataagacaagactgatgaatgtgaatatgtctgaagttaaagcaggcagtagataatgaaaaaggctgattggaaagtccttatcaactgaagagagtcctaagatatgcagagcaggaggactgcacgtagtccaaagttaagaagtgaaacagctgttgctgcaaactcctcaggcttctcgccactgacacagaacagtcccctcaactccagagagaatcatagtctacggaaaggcgccctctggagttgtacaactcagtagccttaatggcctgtgatgggaagattcccaacacctgtaatgcaaggccactttcactataaacttcaaaacaaaatcacttatggtgatgattgctactttcatcccatatcatcccatatcccatctgactcactcccagacctcacctctccattcggacaatctggtcaattcctgagaacctctacctctgaagtcctgttccaagctcccgtctcctctcagccccgagctctaacctagcgacatggacattgttaaaaccactggaattttggtggatttctatactgcaaatattgattgctgccttccttcgtgttgttaccttgctgtgacggaacaacattagagactcagccttcaccccattcctgccatggcagaggacagtcggtttttaacgcatctatccatcgtcacgcccactgttcaaaggctcctcccaagtcagtagggtgtagcgatagaggtgactgaccttggcatgggatggtctgggttccaatctcaagttcactacttataagtactaaca

SEQ ID NO: 63852 - DNA, 881 bp, Bovine  19866881564449
  misc_feature (1)..(1): n is a, c, g, or t
naaaatcaaagtgaaagtaaaattattcaatactactacaaatgcatactttcaaagagcttatatctaacagatgtcttatttaaccttccatttcattcaacaatctattaatgcttttgataacagtgttccattttcttttcttatatcttttaaatgaaaaccagtagtgccttttcagattggttcttcactaaacattatcagatcttaataattcaaaaagagagaacaataaaaattcaaagaaagagatagtgcttatagatattattatagtaagataagggtggagaaattttatctctacatttttatgaaacatatctttccatgaagaaacctaaaagataattcttaatagtatcaattcatgctaaaagaactgatttctctattttcctgcttcctaccatctacttgcccacgtcaaatccttggctctaaaaatgtcttacttacttacaaataaataagtaacaagaggctgagacactgacttgggaagttggagaaaagtaagaagtaacaatttgaaggttacttgagctccatcctctaaagcccaattatgtatcttataatatagcaaggatatgtttatattatgtggtaaaatagacaaaaatggaatatagataggtagtagtttaaatttactttgtgactttttttatgtttatggatgttgttactttcttttaaaaggaggaggataccaaagatgactctagaaaataaagcacagcagggtgtgacaacaaatatccaaagaccatagaactacagtaatgagaatgtgataccttataagaaaccactaatgttaccagtaacacgaagaagcgaagtgaacggttctatgcagacctacaaga

SEQ ID NO: 63853 - DNA, 470 bp, Bovine  19866882059478
  misc_feature (1)..(1): n is a, c, g, or t
ntagttccacactgcactagccacacagtgatgttccacttgttggggagagaaagtgtagacatcagtgtaggaaatctgattcctacgttattgtacatgtcgcttttaggtagacgtgtttaaatgtgattggagattcaattagcagtcagcgcactggagcatgccatgctgtgccacagggtgaagactggaaaaataactaacttttgttagtaaagaacttttacatttagaactttgatgttcgttcactgaactattacaggccagatggcgagattgttattcagcaagagtgaaacaatagaaagaatgtaaatgatctggaaaaattagaattgattgaatgagtacagagtagagcaattctggagaaataggctatggtgttaaaacaaatgtcatattcttaaatcagacttatgatagaactcacaaatgatgttcatctttgtgtgtgtgtg

SEQ ID NO: 63854 - DNA, 884 bp, Bovine  19866882086287
  misc_feature (1)..(1): n is a, c, g, or t
ncgacccccatagacggcagcccaccagggctcccccgtccctaggattctctaggcaagaacactggaagtgggttgccatttccttctccaatgcatgaaagtgaaaagtgaaagtgaagtcgctcagtcatgtccgacccttagcatggactgcagcctaccaggctcctccgtccatgggattttccaggcaagagtactggagtagggtgccattgccttctccgaatcacaccactaaattcttcaaatacataatttattaatagctgcataatactggatcatatggctgtataattatttattaaaagattttctatcattggacattgagttttccccctctttttcacaattgattacaatcaattttgtgatgtacattttttatataaaatgttgactgcatttctgattatttttatgaaggtagttttctataagtgaaaatactgggataaaggacaaacttttttttaagattccagatagatattcccaaatgcctttgcagaatactcataccagtattactgttactaaaagtgattaagaacttgccttactccattttaataactcagccctgaatatgaaagtatttgtcagtttggtgggtataaactattattttagtttggttttagtcttaatttaaatttgtctgattattagtggagttgtgcctttaaatcttcttctgtggattgtcctgttcaggtattttgtgtttttgtttgcttttttagtatattgagaataagtattgatttctgtgaatgttttatctataagaatattaatattatccatcattttgttagttatgtacctttgaattttattaatgattcttgaattattttttagtgtttttt

SEQ ID NO: 63855 - DNA, 1850 bp, Bovine  19866880432936
  misc_feature (1)..(1): n is a, c, g, or t
ncagccatcaagagaggcccagtgaccacacagggtgagtccaggctgaaggaggaggtgggtccaggctgaaggaggaggggctgcccgagttggtggaggcaggtgggaggatggagtgatggagtgagccctggctgcctgcacgaggtagagagacaaggagaggagggaaccaggtggcagggggcagaggagggggtgagtaggaggaccccccccccagatctacagcgtgggctggtggcctgaagaccagcagcatgggctggtggcctgaaaagaccttcaggtctcttagctttcccacctataggatggaagaagaggttgcggagcctccttgttctggcacgtctctgatggtcacacattagtaggagtctgagcttcacctatgtacctgtcattgtgggcagaccagggttggagagttaccttggcttgtcgaggacaagggttttcaattgcgcttccctgcttcatggggatctgagctgggcccatagggatttgcctggagccaggggtcaagcatgtggtcccacaggtctcagcgcagggcaagggggcagctgtccccaccccagactggcaacgccctctgcattgggcaggccactcatcaggagcttcttatccaccattaatccaggtactgagcctgtcctggtgctgaggctgacacccgctggggcctgcccatccgacatagactgtatatttggctctgggtggaacttgcctcatgagctccatgacttaccacataaagtacttagcataatgcctgacacttacctagggctgaataacattggctgttcttggagttataatcatgatcactgctatacgctggcacttggctaaactctttgtaggtgttaccccatttcatcgcatttaatcctcacgagcaccctcttggcccatgtggatgttatcctcatcttgaggcccccagacgtgagatatttacagggtccatgaaggagagttggaagtcagtgctacctgaattagtctggggtgagggtaggtggggatctctataaaagcttgaactttattatctttttctttttaatttttttttcaacccccacccgcgcggggaactccgctgccactgtctccgccccacagacacgttgcaggccagagcgaccgggacgcagggcatctctttttaatttttaaaattaattgattgacttttggctgtgctgggtctttgttgctgcacctgggctttctctagctgcagtgagcaggagctactggctagtctcgagggcgtgcaaccttcgctagttgcggcacatgggtttggttgctctgaggcgtgtggaatcttcctggaccagagatgaaacctgtgtcccctaaactggccggtgcattcttaaccgctggaccaccagggaagtcctggactttattatcttgtttggaatcacagatggaattaacaagatttgctacagagagtccctccctccattccaggctctacctgttgccccttcctaaatgtttaagcccccagagcctgaagatggtaggggttcggggggcactgacccctggtgggagggaataaggttggaggcctcaagtgagcagaaggtcaagcaaggccggcagaagagaagaatcaggtcagaagcaggctgttggctgtacttccttcctggaacaggcacaggaggctctggtcagaacacagaggtgagattaagtgcagcagcaagtgacagcaaggcagctccagggtgacggctttagcgtgggagggcccgcaggtcacagagatctcagcagcccacatggaagggggggtgggg

SEQ ID NO: 63856 - DNA, 1978 bp, Bovine  19866880493846
  misc_feature (1)..(1): n is a, c, g, or t
nttggtgcaacctcagtacctatttccttttaaaagttactgctttgaaaagcaacctagccatttacactccagttcaaagtaagggggagtttgatcccagtctcatcgacatggcaactcttttaaaattatttactaaactaagtgggcttcccaggtggcccagtggtaaagaaccctcctgccaatgcaggagacttgggttcaatccctgggtcaggaagatcccctggaggaggatacggcaacccactctagtattcttgcctggaaaatcccatggacagaggagcctggtgggctacagcccatagggtcgcaaagagacagacaccactgaagcgactgaacatgcacacacacactaaactaatcatctgagctactagaggtctgtaaatcaggaggctggtgcaaagctctgaggcactgtggggtcatcgaaaattagcttcataacttcctgcatcccttcctttacaaaggcatccccatatttcagatgtctttgcatcccagtgcaaaggtatccggaagtactggagggaaaagctaagtattgtaacttagagaccaaggcaattcttcctaaacccatatggtattggtgtgtgtggtaaaagggagggtggatttaagtagttttaaagtttacctaaaggatgaactgatgagaattactaagaaatttttgaaaaataggagaggtgaaagaaaacttgtctttccagatattaagctcttagcattgcataaaaatagaactaaagataatgtaggccaatgttatctgatttaaggatgaaagaaggacttaataaacccaaaataatgaagggaagctacaaaagaaaagtagattttaaagttatataaatcaaaaagcatcacgagcaaaaatttaatgtctttggtaagttagagcacatatttttatcatataggaagaagagttagtattcctagttatttattcatttaacatgtactgaatgcttgcaactgttgggcactgttataaatgctgggaattcagctaagtattaaaatacttttatatttctataagaaaaaaagataagaccctagtggaaaaataggtgcaaacataagcaatttacaaaagaaaagatagaaatagccaataagtatattaaaaaaaaacctacctccctaatagtcatgagcaggcagattaattcaacaatgagaaataagttttcattctaaaataacttaaacattttagaatagttaagctgtgttttggcccattgaaggaaaaactagctgaaacattttggtggaaaaaaaattttttgaagtttttttgatgtggaccattttaaaagactttattgaatctgttacgttacttctgttttatgttttggttttttggccacaaggcatgtgggatcttagcttcctaaccaggaatggaacctgaaacccctgcattgggaagtgaagtcttaaccactgaaccgccaagaaagtcccaataatttgatagtatttttttaatgattaaaaaaattcatgtaatttgatctagaaatcctaggtctttatcctaagcaatgaatccaagacgcagccgagtttaaactgacaaggatgtttatcatagccgtgccatcacacacacatgcacacagatacagatggggatcaaagtgtacaactgtagtaaattaaggtgcatctatattacagagagtattacatggacatcagaaactttgttttctaagaatatttaatatcatattattaggcataaaaagcaagttgtaaaacactgtgaatgtttaaattctatgtttttaaaagcacacagtgttctatatgtgtgtgtgtttaaaggactgaacagttgtggaaaaaatctggaaagatgcacagcaacatgatgactttggggaggagcctcttatttctgttttacaaccaatattttattttaaaattt

SEQ ID NO: 63857 - DNA, 1672 bp, Bovine  19866880521584
  misc_feature (1)..(1): n is a, c, g, or t
ntcatcctgctgtccccagatgctgaaaccactgcctcggcctggcctaacgtggccaaggtctgggtgactgggcggaagcggagccgggccgcccccccacggagcccctggcggcccctgactccactactgcagcaggtaggggccatgctctaggggaaggtggcccaggcgtttggcctgaggcctaaaggctgcagtgtgtgcagaggggcgtgcaggggccctggcacccacacctgcactctggtcacgttcagttgtgagaagagccaggcaggtgggcctccctcctgctgtcctccctttgcaggtgaagcctcaaagcagatggtacttgtgctggagtgggtgtgcaccaccctcctgggcctggaggaacatctgaacgccctggaccgtgctgccggtgatggagactgtggcaccacccacagccgtgcagccagaggttggtgccagggcccacctggggtaggagacggggtggtacggcacactcatgtggcgtttcatgaatcagtgatttcaaaagcatttggagtactcacatggggctggcaactgttattttgccaaaagacgtcatcacaaacttagcgtgcttttcacctgttttcataaagggatatgtctagtactacagtctttcagtgaataattgtgaaagtcgctcagtcatgtctgactctttgtgaccctatattctccagtccagaatactgcagtgggtaggctttcccttttccaggggatcttccagatccagagattgaactgaggtcttccacattgcaggtggattctctaccagctgagccagccacaagggaagcccgaataacaactttaaattatcctaaagggaaactcacacccttactctttctcagcttacccagccgaggcaaaagttctgaattatccagctattatcttgttcaatcaagaaaaatatatttagtgctgaccatgggtcaggtgctgccctcaactctatggatacaatagctagaaaaatattaaaatcactgctcttgtggcttatgttctggtaggaaaaaaagaccattaacaaggtaaatcagtaaaagacaaaaaagagggaagcgaggaagcatcatcgcttctcattgaccaccaaggtccccatcggtgacctgtcccctcctctctccagatgcagcaggacagagggggccggggagtctcttcatgttggttccctcagcctctcctagcgtccattccttccgcctggcagtgaggcctgggtacttggttggggtccaggcagacgggagggaaggtctctgaattccttgccatctcttatctgcctgcagcgattcaggggtggctaaaggagggcccacccccagccagccctgcccagctactctccaaattgtccttcctgctactggagaagatgggaggctcctcaggggcagtgagtgccagcagcccccgggggtggagggctgacacagaggggttctgggttggccaaggccccaggccaacaccgtgctcagcatcctggtcctccccagctctacggcctgttcctgactgcggcggcccagccactcaaggccaagactgacctcccggcctggtctgctgccatggatgccggcctggaggccatgcagaagtgagccag

SEQ ID NO: 63858 - DNA, 1260 bp, Bovine  19866880554933
  misc_feature (1)..(1): n is a, c, g, or t
ngctgctcctggccaatgtcgtggtgttgctgatcctggtgcctgtaaaggaccacctgcttgaccctttactgctgcgctgcaagctgcttccctcggctctgcagaagatggccctggggatgttctttggtttcacttcggtcattgtggcaggtgcagtgtagggcctgggggagtgggatggcctttgtctggggctggagggaggctggttcccccaggggctgatgctggagctgtgggtctgggccaagtacaccctccacctgtgggtgccagtcttggtttctggaagatgtgaactgaaagagaccctcctccttgagtccagcctcctctcatttttgacagatgaggaagctcaggtcaagagaggaaaaaagattttccccagtgggatgtaagccccctgaaggcagggaatttttttttttctttttttattcactgctatgaataatgaggggttctctggtggctcagatggtaaagaatctgcctgcaatgtgggagacccatgtttgatccctgggtcaggaagatcccctggagaagggcatggcaacccactccagtattcttgcccagagaatcccatggacagaggagcctggcaggttacagtccatggggtcgcaaagactcggacatactttgttgagcgactgaacaacaacatgaataatgaacataggtactcaataagtgtgtagaatgtgttttccaaagacacacagctgttcagtggttgggggacttttttcaaaaagtatttactatttattctcttctttcttccatttcaaaaggatttgaagctgcaaagctgcttacaagaaagggctctgataaaagaagctttgcatgctactgtactgacctcaaccctttcactttgtgacataatgatcctgaagtttcttagtgtctctgaacttcatctttaaaaaggagagagtaattcattcagacactatgcagggcctgggctctgccctcatggaatgtggtctaacaggagtgttgtgaggattaaacaagatgaagtcagtaaatcactcagcaccatgcctggatcataagtaggagccagaggaattaaagctcagtaaacagtattgtgtttgtttactggaggatgaaaggatgaaaaccaaactagattgtttttcaactaggtactttggtaaattttgtcctatatcaccctcacaagaatcctgggatttttattcctgtgtgcgtgctcagtccgct

SEQ ID NO: 63859 - DNA, 3712 bp, Bovine  19866880636452
  misc_feature (1)..(1): n is a, c, g, or t
ntggggttcggtgtgtgacgacacatgggacctggaggatgctcacgtggtgtgccggcagctgggctgcggctgggccgtccaggccctgcccggcttgcactttgcccctggccaaggacgcatccactgggaccaagtgaactgcaccgggttggagacctacctgtggcactgcccggggctgcccggaaatgggtactgtggccacaaggaggatgccggagtggtgtgttcaggtgagtgggtgatgctgaaccagggtcatccagcactcactataggcctgctgggcctccatgagtgctggagagacccaccctgcccgtgggaggtcccagtccaaagggaaggtgagacccaaacaaacataatccaggagagagagtggcacatgacctacgaaaggcagccaggtggggttaagaggcagcagacagcgcagaggcggagggtgaagcctgcccgcctcctggaatgggtgacattagagacaagactcttcctgagtgagagttggtcacctggctcagtgcagcaaggggagctggaggcagggaggccctgaggaggccgtcagcggctcccccgatgaggaatgaggttctggtccagccagggcttctcgagcccgagaatggagagggaggagcaatcttgtccaaggtacattctgcgtcagtagatctgaggcagggcttgagagtctgcatttctaacagggtcccaggtaatgccgaagctgccagtccttgaaccacgctttgagcagcagagatgtagacagcacagggtcagccagagcagacggggtggacgagaggggcgtgcagaggcagaagggagagcatctggagaccccttggctctggggagtctgcatccgtaggtcagggctggtgggggtttccactcaaaggatcctgacctgactctgaccccccgcaccccctgcagagcaccagtcctggcgcctgaccgggggcactgacccctgtgaggggcaggtgggaggtgtacttccgaggggtctggaacacagtgtgtgacagtgagtggtacgactcagaggccaacgtgctctgccaggacttgggctgtgggaccgtggcccgggtgcccaaggggctgccccactccttgtcgggcaagatgttctactcatgcaagggaaaggagtccaccctctccaaatgcttctggcggttcaacaactccaacctctgcagacagtcccaggcagccagggtcctctgctcaggtacccctcctcctcctccccactccactgtcccatccccaggaattccatctgaatccacaacctaagaacttgtagcccaaggaccagaggttgggctagattaggaatgacaaatactggcataagagggaccatggcccttaccgtgcccagggtacacggtattgatcaggtattcttttcccccagatcccttgtcacagcccccagaatcatgaatccaatctttattaaggcattattatatatgaagcagtgttccctagtgactggagttggctcaggaaacaaaatcaatttgctatccttgggctggtgatcactgtaaaaagaaaaattagaagacactaataatagggctacagtgtctggagccctaatcaggtgccaggcattccttgggacttggtatgatttcagcaaagcctcctacctgctctatgaattgggtttcaccgagtctaagatggcattgatcataagtcacactgttattgggcttccctggtagctcagctggtaaagaatcctgcaatgcaggagaccccggttcaattcctgagtcaggaagatccactggataagggataggctacccatccagtattcttgggcttccctggtggctcagctgataaagaatctgcctgcaatgcgggagacctaggtttgattcctgggttgggaagccatcccctggagaagggaatggctaccccactcccagtattctggcctggaaaattccatggactagtccatggggtcccaaagagttggatgtgactgaacaactttcactttcacagttattcctttatgcaccatcggggacaaaaacgctgccaaaataaactcttgatatgccatcaattgaattgattgatattaccacccctaatttccgaggtgttaaaatgtgaagaagtaaaagcattagacttgaacaaacacagtgtcagcatctctgtggagttcagacaccaggctatgaattccggctctgctgattaccactgggaggcttccttcatgaatatgcagatgttgataccaggcagttcacagagtagctaggaaatcaggcagtatccactatggaatgtggtaagccccctcccttaccagtcaaatgattatgataatgatgagactgtcagcttcccacttcttgaggcaggtgtgaagaacaaactcaatacaagatggaaaggggaaatatttgggttctctagcagattgtacagaaggaagggctaattctttcattagctctttattttaaccaaagaatcctccttgcatttaatccatcagatcctctttattgtggggtgtgggactcagcatgtgccccggtgggaacacgcccccagtttcaggccacttgtctgtcctgtccactttctagcacaaagcccagccaccccaggtgtttgggtgcatgtgctgagtgaatgagcggtgctttctaacaggtgcccggagtctgctcaatctgtccattactgaagtccctgcaagtggtcagccggtcactgtgggtgagtatccctgggggtagtttttcagaagcttgtttgcatgcatgcatggtgtgtgtatgtgtgtgtgtgtctgagagaggggtctgatggtctgtcccccaaccccccacttccagacaatgaacttgactccccaactgtccctgggctctctgggtgttctgtgctctgctcatttcatctgcctctgcatgtcagctccacagttccgtgaatcctgacattccatgggcaggagtcctcttcccactctccatgagcgtgagtagggcaggaggacagagctagagagagtcagagctgatctgacaccagccagaaagtggggacgccgagggtagcagccagtgtgtttataatgtgctgggcactggccagggctttaccatcattatttcccaaccctttaatcctcccagcagccccctggggaggtcttcccgcaacccttacacagaagtagcagctcaggctcagagggtgggttgccagcctgccaccattgcctggaacctgcatctgaggctcttaactccgaatccacacttggtctgtcctccagctgtgtgtagcttagccatcgcgggtgtcgacttctggggcccaaccctcagctgtacctcttgctagctgtgtgatgctgggcaattcttaacctctctgagcctcagatcctagactacaaaatgaagatgagaatcacagtacttctcacctagtattgttgctgtgagtttctggtgaagagcacacttcacaacagggctcagtacacagtaagcactacctggacatcagttattcttgtttattgatttagtccaggtgtggagccccttggcagctccaggataagcacaggggtcagccctcattcataggcttactcctcactctgctc

SEQ ID NO: 63860 - DNA, 1309 bp, Bovine  19866880647711
  misc_feature (1)..(1): n is a, c, g, or t
ntctctctggccttgcgtctgttgtttctggcattaacgagaagcttttcttcagtttgtgagtggggggggcgtgtgtgggacctccaactgtaaggtagggggcaggaatagggtcttcaaaaagatgggtcataggacccgtctgagggagggaagcctttggggttgagctcgttcctgatctggaaggtaatggactcatctttctttaggctgagattggtaaactggtcgccaaatacttacccagcatcaaagtgatttagaacctactctggcagaaactattctaaacgtctcaaatttaatcctccaagtgccctatagcgttggtaatgttgtccttgccacgtatgaattagggaacggaggcacagagaggtttagcaatgtgccagtaagtggcagagctttgagttaggggactagagctcgtacacctaaccactaccgttctccatttggggagggagttggggtgcaatgaagagcagacaagatttgaggtcagacctgggtatagatcttggctgtgccgtttcctagttgtgtacctcaggacgagttcatgtcatgtctgggagcttcagcttcctcaagggtagacagcattctgcagacactagtcatggcagagacttagaaagtatgttaatattccaggttgcagcgggccctgggaagtctttcttatcctctgttagtggcattgggtcccacattgggcaaaaacaggtagaaaagtttctcaagggcccgcattgttttgtcattctcaggaaaaatggcaccaagacatactccaacttgcccagtgaggctgtctttgcaaactgcgctgggatgctggtggtggtcttcgggctgctggtgctctatatcctgctggcttcatcttggaaacgcccagagccagggatgcaggctgagagagaggtatggggtcttggtctcctgttgcaggttggggtagggccgggtctgaggggtcagccagtagaggcttgggctttgccaggaagaccaacccagtaacgtggtgggaaacaagtagcttgaaggtggggttcggctggctgatggggagcaccagagtgaacccagcgcttcctgtcatggccagtgcagctgctcctagggccctgtccgctgggggagcaggggcttcctcccctccccagatggctgtggtctcacggggaagtgtggctttaccttccccaaggaagggctgtagtgtgaggaggaggtatgctgatttctgcttctccagcttcagagctcatctagtgggatgggagctttc

SEQ ID NO: 63861 - DNA, 1209 bp, Bovine  19866880648376
  misc_feature (1)..(1): n is a, c, g, or t
ntgaaaacaagcagacctgaggtgcagtcttcccagggggacgtgagccatgggggtcaccagcaggagtgaaggtgatccagcaatggccatccagccctggtcccaagaagcacctcctgatgggaaggattttcccagcatgcccttcagaagtggtccacgggaggaccacattgtgtgtgtgtttaggggcatatgggggcggggaaggtgggagggaagcgtctctatcagaaaagaaccaggaagactggaaaggcacacaaagtgacttgtagaatctctgcctcccctccctcagccctccccgctgtggtaaaccaccagcactcacccaccaccaccccggcagggatggaaaactatcaagaggtccccatcaccattgccaaagaaggtaggatgtcgcctgtcctggggttggggagggcaggggaggtcaaaaagggaatactttttggagggtcagtactgcttaggtcaaagcagtgccccagctggagaagagacctgggccagcccacgcatgctcacgggaccttgaacaagtctagcctcagtctgggcctcagtgggcagatgactttccagtgcactcattctagagctctaggcttttgaattctggaccaaaacaggcccaaggcattttggaccttagttctcaaggagagctctgttctgctaattggccagtaggtttgtgacatcatcacctcttctaacagtctgcccagaatcagcctgtctgcagagccccatcaaagttttcctggaacataaatgtatttcatattttccaaataaaaaaaggaatcagtcatccatctttaatgatatactgatgtatatctcttcaaagtcttgtgaaggcattcgagtttaatcccacggtgttatgaaagtattaaatcacctttatttgaaagagttcgatgacacaaaaccaatacaaaactcagagaaatattataaagattctttgcacacaggatccatatatttgagaagagaacatgaacacagaacctagcacaagggtaagctcagagcagccactcactgaatatcatggtgtagagattaagagcccacactgcctcttctctgggctatgtgagactctctctgtgcctcagtttccccagctgtaaaatggggaccctaacgtagctgcctcacagagttattatgagcactaaatga

SEQ ID NO: 63862 - DNA, 1671 bp, Bovine  19866880676386
  misc_feature (1)..(1): n is a, c, g, or t
ntggagaaaatgctagagaggatgccagaagaagggaaaggcaggaaggaaggcactcccatgtggtacccaagccccccggagacctgggccctgctagggcccacacttggccagtgtcacagggtcccagtggcccggcacgtaggctcggggcccagggagctccggccgagcccaccaactcacctcccattgctttcctccagatttccagcccaaggtgcagagccgcctggttgggggcagcgacgtgtgcgaaggctccgtggaagtgcgcagtgggaagggccagaagtgggacacgctatgtgacgattcctgggccaagggcacggcacggtgggaggaggtgtgccgggagcagcagtgcggcaacgtcagctcctaccgggggctggaccccagcgagaagaccttggggggcttctactgtcccccggggatactgtcccggtgccacaagcttgaggagaaaaagtcgcactgcaagagggtgtttgtcacatgtgagttggccatggtccgtggtggttagagggtgattctggatttttgttctaagactcagtcaatgagcattatttccgaagaacagtccaaggactaaagagagagagccctaggacaggatggagagatgacaaatagggggagaggggacagtgtgctcagacagcaatgagcaggaaccatcaggaggagactggccataattgtcaggaggctagtgaataataggattcttattctgtcttctgctctttcagatggaagttaggaaagcaagggatggggtacatctttcctatattaatggtaacggactaatacgtgaaagagagaaatggatgggtggacggctattggtagatgaaggcaaggcgatcactcataagtaactggaaaatggtggaaagttgatagcagaagtggtaaatgagagccggatgatcaattgtgagatagtaaatggtggctaaatgaacagggagcagaggatttcagagatggatggacagacagacagaaaactgcttcccacacacgctggccaattcctaggggacgccagccagccagccaggagcttccctcaaatggaccgttttgatgcccctcccccactccgggccaggactgacctccctctgcctcctgcaggccagaactccagccgagcgggcctgggcgcgggcgccgtgatgagcattattttggccctcgtgcttctggcggtgctgctggtcgtgtgtggccccctggcctacaagaaggtggtgaagaaatgtaggtgacggtgccctgagccacttccctcggaagcccctgccggggagggctgcacgtcagcccctgcaggggagggtccccgccttcggagagctggctgggctcacctctgcttcacctcccagccctgcccctccctctcctgcccactggcccttctctactccaagcaacaagcaggaaaatcactgattcacccacatctggggcccaaaggggaccccactccaggcccaagggaggatgtgggtattctttagactgtgatgggtccagagggtctgacctcagaagacaggtgtcccaagttggctccaccactttgcagatgatggagccacttcctgtactgagactactgtgtgtttccccatccaa

SEQ ID NO: 63863 - DNA, 969 bp, Bovine  19866880701258
  misc_feature (1)..(1): n is a, c, g, or t
nttcacttcccaggactggcactcaacccctgaattataaagaacctcacagcttcctttgatcaagcacctactatgtgccagaaactggcctagaaacttgctgtgcagtaccttattttcataaactataaggggtgtattgttatgtccatttcacaggtgaggaaacagaggctggggtgggaatgggggaggtgggcttcacctgcttgcctaagatatttatccaaaaagtgtcagaactagaattcaaacagaggctacaaagtccaaggccttgacccagacacaggacatgaatacggagttcataagtgtttaagaactgcagctgggctttgggggaaatattaacagcctggaaaaatgaacacatgtagtgggagtgggagatggggtagtggctgtgagggttgtgactgggtgaccaggacaggttgatgtcacctggaataagactcacagatactgtacctggcatgtgccaaaagatggataaatagtagctgagtgaaggaaagatatctgttttgtgctgcttccttgaaggagactgactgctcttgtgcctgactacatgtgaatacagggggccgcgtggcagcctcctcccctccagccccataaatctgcccacttgcactctaggaccatccctcccctcatggaaagaaagtacccacctggaatttggctccactggcccgactcgatggcaggtgatgagcgtggtgtggtgcttggagcccttgaagcgttccagcttggtagtccagagggtgggctgggctaggcgggcagccatcacgtgcagccccttctttaccttaatcctgggggaggggacacaggtacaatttgtcatgggtcgggtggtgtatgttgaagtgtgggctggattggagcaggaagataaggagctctggtctgaatcttctcctcaccaccctccaacccagggggacc

SEQ ID NO: 63864 - DNA, 1333 bp, Bovine  19866880884888
  misc_feature (1)..(1): n is a, c, g, or t
nctttattttaaatcaaagctagaaatgatttagcttagtgaggaaggcatgcttagagccaagataggcggaaagctagtaagctagggttttggtgccaaacacttaccaagttatgaatgcaaatgaaaagttaaataaaaaagaaccaaacagtgaattggacactttacatgggtgaattatatgttatgtaaattatgtctcaataaaacaagatgaaaaaaccctaaaaacttaaaaagaaatcaagagagctcaatcctggacatggtaaatttgggatgtttattaggtatccaaatgaaaatgttgaataggtagttggagatataactcagaaattcacaggaagggttcaactgtagttacaagtgtgggagtcattagcctatgtacacatatatgagactggatggtcttcagagagtgaagacaggtgaaaaaaagagaagtctaaagaccaagccttgattaaaaaagaagatggatgaggtggtataaatcattagctcaaatgtatcaactcaatgggaagatcagatcagatggaaagtccaagggaggcaatagtggaagctttgctccgaaggcagcaaacaaacgtactcagaaaaaaaaattgagggaatttcttgtcaacagaccttgtgacaacagttgcaagaaatgtggaaattttttagagggaaggaaagtgatatagatcagaaacgtgggcctacaatacagaaagaaagagcattagagaaggaataaatgaaggtaaagtgacaactcttatttttattactcttaattgatcttgcaggtaaagtttgttcaaaataattatagcaacaatatctggtccttttcatttatgtataagtaaaataaatggcagcaatgatacaaagacaggaggaaaagttaggaatatcttgctattataagatacttgtactatcagtgaagtagtatattgttatttgaaagtagatatggatgcaaactctaggataactactaaaaaaaaggaaataaatataatataataaatatgctaaataaatataataaatatgttaagaaaggagagaaaacgaatcatgtaaaatgctcagttagaaccacaagaagcagaaaaaaagactggaagacaaaaataggtacaaagaagggcaataagtagaaaacagtaacaagtatgcatattaatccaactatgtcaataataattttaaatgtcaatggtgtaagtaggggcttttcaggggcgctagtgataaagaacccacccgccaatgtaggaaatgtaagacataggttcaatcctgggtcaggaagatc

SEQ ID NO: 63865 - DNA, 1655 bp, Bovine  19866880940278
  misc_feature (1)..(1): n is a, c, g, or t
nggcactttcctaatccctgatcctaagtagatgctcaataatatttgtcgaatgaatgaataaacccttcccttgggagtcactcgttaatgataaggacattttggcgcagctgtttcttcatgcccttgacacacattgcttttttattgtcactaagtggtgcacacaacagatgtctctgatgccactttgttcatttctagctgatttatccttttgtgtttgagcagaccatagtgtgcataaccttcatagtcagaaaaaagccagtcaagatctcaggtctgctccacattattaaatatgattcatgtgtattactggaagaaccaaagtccaatggagaatttcctctgcagtttggagatgcaaatagagttttctattgtgcccccacccccacttgcctcccagtcaaacaaagttggcataatcagggaaagcagaagtgatcctagatgcagccccaagagcagactttggcctgatttaaaaaaaaaaaaaaattcaggccccccagcaagggcagaagggctgaaaaatctttacccagggtttggatcaatctgcgacagccaagccccaggcccacttccggtctgctggctcggatcaactgtactggcagctgtcctgctcctagatcctggtccacagattctgactcagcaggtctggggcagggcccagacatctgaaatctgaaaaagcagtgagctctggaagtcacctctctaaataagcaattctgtaccccatcaccccttcaacaactccccaaatctcagaacctatcattcttcttctacccagagatacatatatccattagctaagtagattttatcaagctttaacttctgtgattgcactaggaaaaagataactaggtattttgttcctttttcaaatgtaagattacagttcacacagatgcatttaaaactgcatccctttggagattttgagggatcctcttggcaataaagagggaaaggcctgtccactcactgaaaatccttgctgtagacttttaagcagaaaatcgaataagtcccataacgagcagtcactccatttattaactggatgtaaatgaatatgacaattgcaactctaaggggaagagcagacagcccattcaggatataaatgagttctcccaaaatgagcagccactttgttgagaatgatggatggcccgttctgaaaccagcaagtgtgttaaaacacttggctcctatgtatggctgttctgccagatgatgccaacccttcccaccctcaagcccatctgactgccccccctgaattctgcaacagcctcctcactgctctggtgtgcccactcttgtgacccccatcaactgtctacctgtggccagagccattttaaagaactcaaatctaatcatgtccatccctgcctcaaatcattttagtgtttctgaactgccctaggggtcaggccagacccctaggcagtctttcagcctggcccggccccacccaaagtccatgctgcccagtggccgagcctctgagaggtcagttctgccaccaagaggtgggagagacaggaggcagtagatggctgaggccctctggaggtcaatgaggtcaaggcacacattaagggcacctggggatg

SEQ ID NO: 63866 - DNA, 1130 bp, Bovine  19866880959669
  misc_feature (1)..(1): n is a, c, g, or t
nttcaaaggctgttttcacagtggcgtcatccgggctgaaggggacgttttttcacctcctaaccaaaactgcaccgtctgtgtctgtctggtgagcatcccaagcttcctgaagcctcatgcgtgttttcttaacctttggggattttagaggaagagggaaaggcagggatggtaaaggtgagctagttgaacaggagggagagctctcaggctgtggatttgggttggaacttgtcacatttcaaagtgtgggggatgggaaggcagtagtctgtggggtcagggaggcttctgctgagcagaaaagagccagcaggcaaacagggtccatctgtcttggaaggggaggggagggtactccttcggaaacttcctaccagggaggctgtttttctctccaggcaaaatatttgccggcacaataaaggtgtccacacgcggagggagaaggctggttaccagactcagcttgttagcattttgctagaggcaagtgcactcctccaagaatagttattaagctcctactatgcgccagacgcaatcaggtgctgtcctgaagactggctcatgagcacccagtgcgcacaagtctagctcctcacctgaggctcctggcagctcttcagggttggctttactgtccccattctacagatgcaaagactgaggctgggaggtgacagaactggaatttgagccaaggtctgtctgcgtccaaacctaggctctgcccaccaatcctcactgcctctgatcatctttaaaagtggccccagcctgtcagggatgatggagctgcaatgtaaaatgggggaggggtggcacgtagaccgctgccaccaccccttactgagcccttcccatgtgccacactcttgtagtgaccaagcacttttgtgcctgatcgcatctcacgcaatcctcaacaaccctggctcttctcacaggtagggagacagaggctcagaggtgatatgctctgcccaaagtaggaggagcaaaccctgggcctcaggtctggctgactccaaaactggggacctttttttggtcttagcttcagtttttgaaaattgagttttaaatttaattctctggccagtatcagtgactggttcaaaact

SEQ ID NO: 63867 - DNA, 1649 bp, Bovine  19866881084289
  misc_feature (1)..(1): n is a, c, g, or t
ncatgactgaagagacttagcatgcatgcagcatgtttcagagtccttttcacaaagcacagggactgtgttacattcaaatctcctcttccacagccttgtttttggttgaggagtacaaagggaattggtcagaggctaataaaaccttttgccctctaaggagaaatttggccttgggtcagctttgatggagaaggaaatggcaacccactccattattcttgcctggagaatcccatggagggaggagcctggtaggctacagtcaatggggtctcaaagagtcggacataactgagcgacttcactttctttcactttctttcagctttgatacactaggaatattagttgtgttactatgccacatcacttatgaataaaacccctgattgatgagttgtttctggattggttgtagctatgagcctaaattaacctgtgggagaccacagctttgggtttccctgaatacagtgtcttgtagttaatcatgcatgtctctggcaggtaccttggcaactatgcttatggaattactacaatatccttccttactcaaaatatccactttagaaatctgttttaatttattctccaccacatgtttcttcttttctctttccttgtgtagtctctctaaaaatctccaaaaatcattaagctcaggcctttggattttcactctgccaaagaagggcatcatagttttccaaacagccactctctttattactcttcaaacatacccttcaatatcatttatgcatgcacattccattctcttaaaggatttatcaaacatacaacaaacataaaaatgctttccgtaagtatacactccccaccccagcccaaatcctaccctccactttgttaaggctgtttccacagtaaaatttgctgtttagagtcagatactgggtctttagtccatttcttgatctcataagtaattcacttgatacattagaaaaaagatgaaagaaaaaataccataaaatggtttactcacaaatggtgatgaccatatgatgtaccctagtgtgagtaatacagggacactgccagtgacttttacatcctcttcaccgagaaacaagacagcacagagaaaacccagtgtatagtgaaacagggcaagaactatttgcacagcctgtgaggagagagagtcatcatcattactcaagtcaagtctgtcacagatgcatacaatctgagtgactgaaaggtcgtgggaaatgttcaccttaccctggtatttccgaagcagtgatgaaagacttaacatgtcagggaggaaccaaggtggataaaggggccacatttggggttatttaatgaaactgggagtatttgtctttgttttataataatctttggaggtaattaatttaaatctagttggttctagcttagtgaaaagcagagacctatttgtttggttcaggcagacacacaacagaaaggagatgtctggctctggggatgtctcaggctctgccttgacactggtctcctttctgcggttgcttctctgaggccacctccagtgcacacttggtccttttggacttgcctcctttctgtcgtcctctcttgcctgggactggacttgggtttcccttgctcttcaccattcc

SEQ ID NO: 63868 - DNA, 1239 bp, Bovine  19866881170291
  misc_feature (1)..(1): n is a, c, g, or t
ncacattaataaaagtctatctacctcattcctttttaatggtctgcattaaaatgtttccacccatacatctggctgtaaggatgtaccgtcattcatttaaccgatcccctagtgatgcacattgaggcagtttgcaatatttcacttagtgattattgtatctgtgagtgggctgcaccgggtgggagtcagcctccgggctagtggtcttatttactgttagttcactatccctgtctgggcctcagcctccttttccctttgtaagatgaggatgtagggacatcggggagaaccctgggatgtctccagctgtagcattctctgacttcttgaggtggcaaccgatttttcaaggataggaagtgtctggtgtcatttagaataaatggcacagctaagaagagtgttcctttctcaaatgatactgtgaaagccctcaaataccaggcaggcttaaacagtacctttatcctgatctgcagggtgactagaaggtgactttccaggacacctcgggctgggaacacataggaaagcagctttgccttcaccactgagaaagtacagccatgcaggcaccggcttttctctcagtcacctggttctctttttctacgcattgctgtcagagtcctgcctttttcttaactatgactttttattgacccacaaacacgttaggatgtcttaggttccatgtttgctctgcagcaaacctctccatgatctacctgccagcagcaccataccctccacacaatgctcttaaaatgggcttctttttaggaaaaaacttcttgttatgtatcaaatggacttcatctcagcactctagctctcaccccatatcatcaaaaacaaacttaactggagaaaactataatccagctgtaattcaaaaagatacatgcaccccttagttcacagcaacactattcacaatagattagacaacgagacaacctgactgtccatcagccgatgaatggatgaagaagatgcgctgcatatacacaacggactactactcagccagaaaaaggaatgaaaaagcaccatttgcagcagcatggatgggcctagagtttatcctaccaagtgaggtaggtcagacagagaaagacacgccacattctatcacttatacgtgtggaatctaaatatgacacaaatgaacctattgatgagacagaaatagactcccacacagagaacagacttgggtcgccaagg

SEQ ID NO: 63869 - DNA, 944 bp, Bovine  19866881183239
  misc_feature (1)..(1): n is a, c, g, or t
naaaactgttataggatcccacttccacagcagagttcttccctagatagtgacctctacccatgggaaggtgagatggggtcttcgttccagtccccatactccacatcttgaattggacaaaagcctgtagctggtccctagacctacaacttctgctttctcttctctagggaaagtccagaggagaaaagaggaagcaagaactcatgatctagaaagcaaagaatttattttgaggtttccgcatatacctgataactcagaaaccaactctggtttcaggcatggtgaatgcctagccccctaagcagctgctcttaaaagccaggcaagtgggcatgagggttggcaggcaatctgcaaagccacaggatgcccctgctttcagcatgaaaacagctctcaaggcaggcacactgtccctgaggagtcaggccaaggtgacacatggcttccggaacttgaggttcctcaactggaaccagctaacacaagaagaggcccctaaaattgccaagaactcccaaagagataaaacatttgaccctcacctttatacccagtgacaagctgacagagtagtggcctggactccaattcttaggctctgaggctccttgagcaaatcacttaacatctgaaggactgtcttctcatctgaaagaaaaccatggcaacaggatgtaacttactgaaaggcagctatgaacagacatcacaccacaaccttaagacacatgattgatcccatgttctcctcttgacaatcctgtgaggggttatttccatttcaaaccccatgtttttaatttgatcacaagttgccagaggatcaagtgagaaaatacattaaggacattgtaaattattaaaattttcttagtagtattacagcatttcatcctaactactaacgaaaccctgaagcccatggctcttat

SEQ ID NO: 63870 - DNA, 992 bp, Bovine  19866881191767
  misc_feature (1)..(1): n is a, c, g, or t
naggactgcctggctcagtgcctgacacaatgagcagtcaataaacagcagctctagtgttcctttctggtgaggtgacagcatgacaccggagatgtgccggtaaattagagaagatggtgggaagagctggcccccgttcctgtctgtgtgcccaaggtttggcacggtgaggagcttgggagcgtctgctcgagagttcagggtcactcagatcttgcttgggtcactgataccggtctaggccgtgggattggcctaggataagagcgtcctcttatcaagggctgactcctctgctgggtgctccccacgcctccccaccccctcactgtggtgtctccctctcccaggatgcggtcatgctccacagcttcaccctgcgccagcagctgcagaccacccgccaggagctgtcccacgccctgtaccagcacgatgccgcctgccgtgtcattgcgcgtctcaccaaggaagtcactgctgcccgagaaggtacagcctccggcctgccatcccccactctggggtccactctggggcaggcctgttttgtaatagcccattcctaacattgccttctctctcagctctggcgaccctgaaacctcaggccggtctcattgtgccccaggctgtgccaagctcccagccaagtgttgtggtgagtgtccccgcagccccgccagcagtggagtgtgcatggtggcccatcggcctcctctgcaagggaggaggagggcattctgtgctcctctggcattccatgctcctctcaccttcctccttgttctcttcagggtgcaggcgagccaatggatttgggcgaactggtgggaatgactcctgagattattcagaaggtacgtcatgctctcgcttggtgggaaagctgatggactctcccttttgcctggagtccaatatgagtaaaaaccccatccatttggagatggagtggagtcgtacagagcacacactcaaccaggctg

SEQ ID NO: 63871 - DNA, 1518 bp, Bovine  19866881215559
  misc_feature (1)..(1): n is a, c, g, or t
ncgaccctggttccttccccatccattggccaatgcataaaatttcagcttctcttgttcatacgctcattctctgaattcacgtattctaccaggaattactgagtgcctgctctgtgttaggcacaggacatgcaaagccaaacaagatgggtgcacagtttctggccacagggagctcctactctagctggaaagataaattatgattgaggaggagcaggatgagtaggggaacagaacccaagccagggtgagagtgctggtgtggaccaagccagggaaggcttctcagggaagtggacacccaaaggttgctagggagatcagtgtgtcccagtttccccgggactgtcttggtttaactactgaaaggctggcatcccaggaaactgctcactcctgggcaaacctgggctatgggtcacccaagcaggccaactgtgggcagaacagctagaggttaaggctacctgggggcagacagtctttgaagtggaaagtggaaggaaatgtgtgtgtgggtgttagtcgctcagtctgtccgactctctgcgaccccatggactgtagcctgccaggctcctctgtccatgggattctccaggcaagaatactggagttgtttgccattcccttcttcaggggatcttcctgaccctggactgaatctgtgtctcccacactgaaggtagattctttgccgtctgagccaccagggaagccaatgggaggaaatgttttgaaacaacttctccaccatcttgccctgaccttagaccaaagtgacaagccccctaaaagccaagatgtatggacaggggaccccccactctccatagagattctggtagactgtcctgtctctttgctcagaagggaattggctgtctcatccttgctgagtctctggggtgtggggtcggagggggtggtcccagacattgcttatcctccagtgatgtgcccttctccgggtctctctgactcggccaacttttaccttctccttctggagcacatgtccctgtgctggctgttccagggggattaattatgttaattatgagtgtgtaaagaaatgcagtctggggcccatgccaggatatagcccatccacaatgacctcacctgtccacagtgatctgccaatagccctcaacagaaacaggcacccagttcagacttcctgagtagtaagaagaatcgatgtcaccgaatatcaccacgctgccgctctcttcgttgctatggagagtggagggaaaacaggaattcattcatacattcacagttccaactgaacatataaactgtgtgcattctaagagctactttaaaaaaaaagctttttgttttgtattggagtatagctaattaacagtgttgtgatagtttcagatgtacagcaaagggactcagctgtacatatgcatgtatccattcttccccaaactcccctcccatccgggctgccacataacactgagcagagttccatgtgctatacaggaggtc

SEQ ID NO: 63872 - DNA, 1023 bp, Bovine  19866881601211
  misc_feature (1)..(1): n is a, c, g, or t
ntgggtattgtgagaaagcgccctagtagtgaacgctccaagggatgaattggccccactcgtcagttcaactaaatttccaaaaagtatttgctgaggtcaactatcatctgggcattggaggtacagcagcgaaacccacaggagtctcatttctctaggaactaaggttctggatttctttgtctctggacagccctacactggttcaaggcttggataccacagtgccggcatccctgcagcctctttgtggcggcttccctgcctccaacccctacctctctaccccgctccctgcccccacagtgggcaaaccctctagattgatttccctgagccccactctactcaccctcctctctgagcgtacaggcctctgctcagactttcaacagctccacatctcgttttgcacaaacccacctcccaagggggacccccaccccgcccccgcccgcactatggcctgcatgtttgtttccgcggaggctgacatccaactggttcccttgttacggaggcccttcctccatcccctctctgtctacactgtcctccagtttggggaagacggcggtccatgcccacccgagtcgtgctgcccttcctgatgcccacttctcttgacccgtgaacttctggagggtcccaatcatcctcgacagcgatctccctcgtccccagagcccgccttccagggctccgcgtccaggcgcaaagagcagcaggtcccttgatgctggcgcgcccccgtggccacccacgaggaaaaccttcccgcggaaacgcctctgagttcccggatgtatgagtggggcgctctttgcagggctggggcggggggcggggcgcggtgtgaggcactcaccgcgtgagcttgggcgcgagtggcttggcacccaaagtgggtggcaatgactgcaatgaagaactccagtatggtgaagatgtaagcacggccaaatagcccctgcccacatcctggggaccaaaacccacagtcaaggccagtcgagaatt

SEQ ID NO: 63873 - DNA, 1192 bp, Bovine  19866880339765
  misc_feature (1)..(1): n is a, c, g, or t
ngcgatggcaccccactccagtactcttgcctggaaaatcccatggatggaggagcctggtaggctccagtccatggggtcacgaagagtcagacacgactaagcgacttcacttttacttttcactttcatgcattggagaaggcaatggcaacccactccagtgttcttgcctggagaatcccagggacgggggagcctagtgggctgcaatctatggggtcgcacagagtcagatacaactgaagtgacttagcagcagcttagcagcagcaggaaggacagcatggttagggaggggtgagaaagagagagactgggaggagttaaagtcaaatcagtctgtcagcagctagatagccaaggcctctggatcttttctacatctaatgggaagccataatggttttgaatgtgggtgagccatgatgtactttatgttttaaacagatgacctcagagtagtagtgtgtagagaacaagaaaacaaacaggaagatgagttaggaggcttaagtgtgaatcccggtgggagacgatgaggcttggatgcaattggtaagtggtggttgtaagatgtagctggactcaatatatattttgaaagttttgttgttaagatttcctgaccgaatttggactttggcttgagcatctggctgaatgatgatgccattttcctagatgaggaaaatgtttgagatgccgttacctgttcaagagaaggtgaccactgcatctatgagccttgagttcaggggacaggttactgctggaggaataaggttgggtgttcagctggtaggtagatttaagtccacaagactggatgagatccctaagggagtgagtgtagtgggtcaagaaaagatacctgaagactgagtcctggggtccagcatttagaggctgaggagctgaagaggaactagttaaaggggactgagaaggaacagtcactgaggataggaggatggtcaggccagtgaaatgttgcaaagctccaagaagagagtgcagaaaatgagagaggagtgaagaactacaggaatgctacagagcggtcaaagacactgaccatgacttgaacactgaaggtagcagcatgaggtcacagtgatgttgacaatatcagtgtcagcagttggttggaggaaaaagcctgattgcaattggttcagttgaagatgag

SEQ ID NO: 63874 - DNA, 1947 bp, Bovine  19866880559881
  misc_feature (1)..(1): n is a, c, g, or t
ntaatcagaagacttagattttggtttttcttctgtaaactaactgctagctgactgtggcaagtcactggacaagtctggatttccacttcatcctctataaaatgaaggtgatggattgtgctagtgtaagtcattttagtcgtgtccaactctttgtgaccctatggactgccgccaggctcctctgtccatgggattctccaggcaagaatactggagtgggtagccgtttcctattccagaaggtggtggattaaatgttctcaaatcactgttctcaaatgccctttcagtttctagctctccatgactctttactaacaaatgtactgaaaacacagacagactggcctgttgaaaatgtcttgccatcactacagcatcaaaaagctagactagtgtacaaaatattgtctatccacaactcaggctctgtgccccttttattccatcctgggtgcagccccatcatcttgctcccagtgactataatgcgctgtgtccatccctattctattttcttaaactggaaattctgccaaaagagtcatgccagcaaattaggtgattagagataaaactggttctgccggcaatgtgggagacctgggtttgatccctgggttgggaagatcccctggagaagtgaaaggctacccactccagtattctggcctagagaattccatggactgtgtggtccatgagccacagagttggagacaactgagtgactttcaccttcacagttgaaacatggctttaaggaaattaaattggagatgtatgaggtcaggcttccctgctggctcagtggtaaagaatctgtctgccaatacaggtcaggaagatcccctggagaagtaaatggaacccacttcagtatttttgcctgggaaatcccatgaacagaggaacctggcaggctatagtccatggggttgcaaaaagcgttggacacgacttagcgactaaacaggaacatgtattcatatgaaatacattcatatgaattcatatgaatacattcatacataattgaaattgagcattctagagagacttgagaaggttggttctgccttttagagcttgcattatgggcaagaaacctgagcctaggaagaaataatatatatgtgggttattaggcaacttcttcattaccttttttcctttcatcaaagaactatacatatgcaagtaactagatcacctcctctcttcttttttccctttaatcacaactgagagggaagtttccagctgggcattaaattaggtcaacagctaacacagcaggagtataggtgacagggacagcaagaggcatatacacaggaaataaagggcactgtgtagccagcatgggtaagctatggagtagtgcacgggccccattaagatttaaagtaataagagatgagaggaaatacggttaccagccgttgataaacactcctgccttatggaaggtgttaatttcactcactggctcttgatgcctcaagtataatctctcgtggcgacctttatcccccagcgcaggcctaaaggacacctaggaaatgtcacctttgtagttgctcgaagaataaccttgggtaactgcggggagacctgaatacttcaagtatggcaggtgtatggagtttcatccatttacaaaattgttgattcagcttaagaaggtatgaaaaagacgtccttgaccctggtatgtgcagatggaagtggcatttcatcaggagtgtatatggaaatgtgcctggctgcaaaacggaagatattttctgctcaaatatgtaataatttggaaccatttattactagtgaacagcagtgtttcctccccgtgaaactgctaatattggactaggacagcctgtcccgccaggagcactgtccagattgttccggaggtgagggagggggccattcctt

SEQ ID NO: 63875 - DNA, 3610 bp, Bovine  19866880579152
  misc_feature (1)..(1): n is a, c, g, or t
ntcctcctgctctcaatctttcccagcagtagggtcttttctaatgagtcagttctttgcatcaggtggccaaagtattggagtttcagcttcaacatcaatccttccaatgaacattcaggactgacttcctttaggactgactggtttgatctccttgcagtccaagggactctcaaaagtcttctccaaagcatcaattcttcagcgctcagttttctttgtagtccaactctcacatccaaacatgactactggaaaaaccatagccttgactaggcggacctttgttggcaaagtaatgtctctgctttttaatatgctgtctaggttggtcataactttccttccaaggagtaagcgtcttttaatttcatggctgcagtcaccatctgcagtgattttggagcccagaaatataaagtctctccaccaagttgtcttccaccaaccttgcctctgtagtattagctttagagtggtgagtggtgagccagaccgcactttcagtaacaaagtcagatctgttttgttgttgttaagcagtctgctctgaagaaagtaccattgagcatggagagggtatcctaatgtttaaagtatacagtagaattgaccctcagaagccataatctttttttgcaagactataaaagagagattagtagttagagacttatagaatgaggggttatctcttctttgaatcttttctctgaagccacttacttgtagtgcaaactccctacatgcttgagactctgggtcttgttttcccttctctctcctctaggatctcctacttcctttgttgctttttttattctgctcttttacctttcttctttatctctgccaaaagtttttattgagtgctaatgcgtcagggaaaaatatgatggtttctgctctcagaagacttagttttgtggaggcaggcagacatataaacaaaaaatcacttttttttgaaacttcacattgtagtgcatcatttttcatcagttctgggctcaagaatacaaacagaagaaagtgattactaatgttggcaaaaactaaaatagaatgcgtcttcttgtacattaacagaacatatttgagaatttgaaaagtatgtaatttttttatatcatccaatgtattatcaatcaaactttcagagacttcaaatatactttctaaaacacaggtaaaaatacgttagttccgtgagacatagacacacagctcatccttgagaaagctccgtgaagagaagggggactccaaggtacacctaaggtacaatttttgtgggggatcttggaccaaggtaagatattctggatatcttaagaaaattgtgtgtttctatagagtagattttccacaggcggtatgtagacagcaaggaaattacagcgagtgaattgaatgaatgctgagagtagacagaatgacttgcttagaaaatgacagatgaaaagggatactcatgcatctatataagaatgcacctgccggtccaggagccacaggagacctgggttcgattcctggatcagcaagatcccctggagtaggaaatggcaacccacaccagtattcttgcctggaaaattccatgagcagaggagcctggcgggctacagtccatgaggtcacaaagagtcggacccaactgagcaactaagcacaggcatgatgttctcatcaaaagaatctgacaatctctccagagccatcagtgctccttctttctgatccagtaatgcaacttctgggaatctaattttaggaaatatttcaaaatatggaaaaatccatatgcatggaaattattcactttggttctatttataataaccaaaatgctctgtgtgtccctcagtagagacatgcttatgtaagttaaaaacattttcttcatggaatgttatgcagcaattaaatgatgatcttaaaagactgtgaagtaatttgaaaaatgcttaaataattcaaaaataggataataattgttcaccatgaccaaaactatgtaaatgttcttggggacacgaaaaagataggcaggaaatagagttaaatgtttataagtattgtgttaatgcaggactatgggtgtaaaattatcatactgcctgattgtatgatgaatttgtgattactttgactatggaaatggtccatatttaaacactgaacaatcgaagtagatgtaggtgcctttctatgatatgtgagcagagtcagtgggaggttttccctgggacatatagctatagtcgagtcaggcttaagtattttgccagtcaatcctaaaggaaatcagccctgaatattcattggaaggactgatgctgaagatgagtcaggtgaaaagtatggcttaagccagttggtctaggagatgacacagaagggccgcagagggaggcagaggtcagacgaggcggtcatgctgatttgagagtgtcaactttaacatgttatttgtatcccagacatcaaaaccccatcctgccacagctggtttgcccagggaaataatgatttttttctctgccttctttggagaccttttgccccacttgattggctcagtagttctaggatttgctcttttcaggagctattgatgctctagaaaaaggctgagtcagatgtattgatgactccgccactgttcttgtgaggaatttgcctcctctctttcctgtagctttagttagaattatttgtctttggactcattcctttttatggaaatgataatagtgttcatcatgacagcagccatgactaactttataagcacaaattgtgtcagatgaagaaagcactcacaaactccccatttttagagggacacatgaaggcttagattgtttaagtaacttactagtattatataacaggtgagtggtagaaatacaattaacttttaaagatgtgttcattatcttttaaatatctttattggctaaaagttggtaacttaatgtcagtccctcaattattatttttctcccctaaaagtccacctgttcctgaaatcaccgggccttggaaaccctggattattttttgaacccaaaactcagggcccgtgatttgacagtggaagagaatactttaaataggaaaagtgccagaaaaccccaactacaagattgccgttaggttcagaagaagaaccaaagattcagcttgctgttcagagtttaacactgtgtacaaaacatcctaagaagaatttgagagcttcattatttaagatgtaggaaatagacatttctcaggccttgtgcaggaaatggcaacccactccagtactcttgcctggagaatcccatggatagtggagcctggcaggctactgtccatggggtcacaagaatcggacacaacttagtgactaaatcaatcagctctgtgcagtcctgcctgtctctccataagcaaggccacttcaccatgcattacagccagcgccgtgccatcctttcccatcaggaatcatctttcaaaagtctccaaattgcaaacgtgtggctctgagtgtcaagtgtggtatgcactgtatttaagtaccacttaggaagaaatgcaaaaacctcagcac

SEQ ID NO: 63876 - DNA, 1166 bp, Bovine  19866880623617
  misc_feature (1)..(1): n is a, c, g, or t
ncagcagcagtggggccagcacccaaggaaacagtgaaaagacagggtcccctcgggacaggtggggccaggccaggtgaaccacaagcccagaatcagagtcagaagggctgaggggagtcctgcagcatctccctccccgctggagggaagggtgctgtcgtcatcaccagcagtgagctgtttagcaccacgtgggggaaccaccctggcttcttctgagtatggacggcagttgttctgagcaaatcagacaggagcttcgggggacaggcagctgagcagtcttcaggcagccctgttggaagaggtgtgcacagaagtgagaggggagattggggatgctgggcctcaggtgcagccctgctttttcttttttaattctctaaaacgtctctaggtgtcctggggtttgcagttgctgaggaaatttcattctagcccttcttgatccatctggaaattctcttctctctcaagctctgggagactgaagggctggctctctcattatcctgagattaagggatgagtccttcctgtttgaagggctgactgttatcctctgttttctttttccgtttgacggggcccaggtacagaagaccaggtcctgtcttcaaagatgagaactgtctctccccttcagaaagttacggtccagagggaaagaagcaaaacttgagtaacagaaaacaagtcccaagtggaggcatatggcacttaccattggagcaagggagaaacattatgttttggatcttacctcacatcctttgaatggaaaaagggaataaaaaatataagcattcattttgtttatccattctgtatataatagcttacatttgttaatcccaacctcctgctccatccctccccagtcctcttccccttggcaaccaaaagtctgttctgtatgtccgggagtctgtttctgtttcatagacaggttctacatgagctattatatagagaatggattaaacaacaaagtcccactgcatagtacagagagctctattcaatatcctatgataaaccataatgggaaagaatatttttaaaaaaaaataatatatatgtatatgtataactggatcacttttctgtacagaagaaatcaacacattataagtaaaatgtgtgtgtgtgtgtggaagtcg

SEQ ID NO: 63877 - DNA, 736 bp, Bovine  19866880659877
  misc_feature (1)..(1): n is a, c, g, or t
natgtgttacagaagtttctgctgcaacccataaagataccattttagaaaggagaggaaatccaattaaaaatccaactctccaatcatcacaccatctttctaatgtagaaagtgctggaaataaaattcctggcttcttagtatactggtaaggaaacttaaatatttattatttctaattttagtatacaacttaaaaagattccctgaggaactgcctactatcataaatttttatcaacataattaataacaatagcagagccaggaactagtaatgaggctgtaaacttaattaagagcaatagttacagagtgagtcgcactttaatagactgaagaatcacttgaaagcattacgttgctgctcagattctgtgctgtttgccctgagtaaaaaaagctccctgtccaaatgaagtcacttcggagagccaagaaccatatcagagctgcatttaaacattagacttgcatttaaaaatccccaaggaatgaatttcggtaaatctttccactggttaactcacagttgatttgcctgctcactggtttgctgtcaatgagaataaaaggtgataagcatcagggctggagctctaacagcattaagtgtaaaggcagaaaatcatactaataggaagaattccctcaatccaaaaactcaagattccgtggaaatgccagttttacagggacactggagatgggggctaaagtcactattaggcta

SEQ ID NO: 63878 - DNA, 1946 bp, Bovine  19866880701929
  misc_feature (1)..(1): n is a, c, g, or t
nagggaacataacccagtcaacacccagtttcagacttcctgtccctagaattgacagaataaatttctgtttttttttttttcttttttttaagtcagtatgtgatgatttgttatggcaactctaagaacctaatatcaggatttggagccaagcatagaaaacattgatgttagtttgccaaatgccaaacaattttgaatctgctcataatcgggtatcattttatcacgcttagcttcaggaaatcagagaatcgagcatatttctaaatgtgctgcctacgtatggtagcctggaagtggggatatgaagtgtaaaccatgggctcgaccaaagcacccttgtaaacttccgcctggccctgtaactgccctggtagatggtcagcatgaagggaaatggtcccaggaagactcacaggcggaagctgatgccctgcggtccattcagggcaggagtcacggtcgtgtacaaggaggtaacctggttctttgtctctattatggtaaatagagaagaaagcaggccttcctacagcagtgagggattgttaatgaagtaaaggaaacagaagaaatgtcccagtggagaaggaagtgtgtcaaaaacagattgtgcacgtaattactttctcagaccttcctgacattatcagcaggagtggtgttttgatgagaaaacttaattaaaacttaatttttttttaagtggaaaatattcagcatggttacaggaggattgaaatcaggatattgtgtaattttaatcgccttcaagagatgtgcctcacacaggtgagtgtgaggagaaagcagccagagggacagaggtgagtggccctgtcacatctccagcattggcaggtggtggaggccgtatgctggggtggagctttccctgtgcaacctcaggttccattgttggcacatctgcccagagcaggggaagtcttgggtctgttcgggagtgtactggcaaggccccatttggattacacattgtaggaagaatgttgatttttaaaaaaatttttaaatgtatttatttggctgcatcaggtcttagccgcatgatgtgggatctttgttatgtcaccatggcgcacgagcttagtcaccccaaggcatgtgggatcttcccagaccagggatcaaaccgatgtcccctgcattggaaggcagattcttaaccactggaccaccagagaagtcccagaatgttgatttttaaattataaggtttgttctccccaaaaagggaaactgaaagttgaggaggttaatgctccacctgaggcaatagtttttaaatgctgatctctgaatcagttctgtcagaatcatctggttccagttcactaaatctgcttgagaacctatgtatttctgtttttaaaatagatcttcccaggggattctgggagtcaggtgtgggaaccgcaggtttgtaatgagaggagcgtgaacttcgaaacaagtaaatgtggaccatgccctttacttctcgtggagagtcaagctgattgctcggcttcctccatcaaatgggagtaataaacttacctgatggcattttgtgataatcaaagatcacaccagtaagtgactgagacacagtaagtgatctcaagatgataaaactgtataggaagaattgaatcaggctccttgctaaatttggggagataaggcagctttcttcaaatatttagaggacagctgtgtggaaggggtaggcaactcatatcttgtgccctttagaggtcatactcaggtccagcaggtggaagtcagaaggagataaatttcaatgcaatataaagtggaactttaaagcgaatggttcaaggatgacccaggcttacttcagagaacagtaccttcctaatccctggagcaattatgtttgtttgttgtttagttgctaagatgcgtccaactgt

SEQ ID NO: 63879 - DNA, 799 bp, Bovine  19866880713359
  misc_feature (1)..(1): n is a, c, g, or t
nttttgtttggggactgccgctgccctggaggactgcctgcgggtgctgcggctcctgctgaggctgccgttgggtttatgccgctgtgtgacgacaaggccaatctggcagttctgcggagatgggtagggtactctttcattcctggctgctttgctcttccaaaagcattaactccaattcagttggaaatcattctccttttcatcagccccaacttctgaacccattcctccagccacacctccagactgctttggacactttgtggcggggagggggggcggtggggggagtgttttgcttattcttgcttgagttgcagcctggtttgtggacactctctccctagattgtcagttgtttgcagaattcccaagtaccaggaagtattttctgatacttgggaaactttcctgcccaagtaccttcattgagtggcaggaaataaaaagacaagcaaggaactagtagagctgagagcatagccctttatcattcttccttagctaatacatctaatagttatcttggaaaggagaatttatttaaacatagtaaatactgtggagagtgacttttatgtttgtcatagtaataacactgctaatgctacacttcaaggcacagtgaataaacctttgaagaaatatcctcataatatggtttcagaggacatgcatccttctgggacacattgccaaagtagagttgttgtttttaaaattagcatgcagagactctgttctaaggctgtatctgtgctccactgtaatttgtctgtaatgggtataaagt

SEQ ID NO: 63880 - DNA, 1901 bp, Bovine  19866880834184
  misc_feature (1)..(1): n is a, c, g, or t
ntgcctcaagacatgggggagctgctggaggtgtttggccggtgggcaacatgctgaaagaaatattttaggaatatgtacttggcagtcatgtgtaggtggggataataatacttaaatgttggctgttgtgaagagaaaatgaaatgacatgactgaatgtgcagatgcaggactaccattctttcatccattctattgcttcctctgaggcctggtgccccccaaggacagaataatctcttgactagtgtattagcttcctagggctgccacagccaaatcccacagattgggtggcttaaatgacaggaattgcttttctcacacttttgggggcttggttgtctgagatccaggtcttggcacagttggttccttctgtgggccatgagagaaggatttgttccagatcgctcccacttggcttgttaatggccatcttctcattgtcttccctctgtgtgtgtgtgtctctgtccaaatttcctcttcttataaggactctagtcctattgcactagagttcatcctaatgaccttgtttatattgacttaccctagaaagaccttacctctcaatatggtcacattgtggggaactggggctttagcactttaacatacaaactagcagggggaaacaccattcaacccataacaccgagtctttttggagactttctttttcaggatcttacacttaggtaattacttaggtaattaattacaggctatcttaagaggtatttcaagacccaggtgccccctcctccacccaccatatgccccaaattatgttcatctcttgcttcctgttattccatcactagaattactcagtgaaataaagcagtgatttaagataatttctgtaagcatgcactccttttataccagagcagtgaaaatagcagccaatgaactactgggtgaatttgtttaccaaatggcaaacaagtactaatatgtgagagctagtttgggaagctatgatgtgctacacagtacagcacatttggaccatcccatggactgtcgtggaagactgaaggctctggagccaggctgctggggtttgaatcccagctctgccctgttgtgcctctgtgaccttaggtgtattaatcgctctgatttttatttcatctgagcattgggcacaataatagcacctgcctggttgattagaagataaataagataaataagctaatatacataaagtgccatgtccagagtcaactttccaataaatattatctgctattattgttataatttcatatgaattacaaagcacaacccttcttggctatttgttgatagaggcaatctttgaatgaggtggtttcctatatcagatacgtggaatccagttgcctcgaatttccccatcctatgtcggttctgccaggtgacctactagtgtgggttttatgatgttttccgtcctcagcatatagcctgtgatatattttctaggacccccaatgataaactcaatacattagaacagaaaaaagttcctccctgttctccaaagtgtggttctcaccagggtacttattgcatcctcaagcatgcagtgcttgcttgagggcaacaaaaataaatggggagaaatcagcattctcctagtgatgaggcaaggttgaaggatgacatcattaaaatgaccacgtatcgtcaacttggaactttgcatgtctgcaaagatggccgatcttgctaatttcaaattttaaatttcaatttataaacagtgctgtgatgaacgatgcacgatactggatgcttggggctagtgcactgggatgacacagagggatggtatggggagggaggagggaggagggttcaggatggggaacacatgtatacctgtggtggattcattt

SEQ ID NO: 63881 - DNA, 1544 bp, Bovine  19866880851530
  misc_feature (1)..(1): n is a, c, g, or t
ntacacaaaagcacagccatttgtggacgatgcacacatgtgacaatgtatgccaggcatgtgaactaacttacatggctggacaggcaaatacatgtttgcatctttgaaagttcacaacttgaaggtttgtatgtagggggcctactgtatcccctgtgtttggactttaaaaaaaatttattgaagtgtgtatatatatgtgtgtgtgtgtgtgtgtattctttttcagatgcttttccattagagattattatattgaatatggtttcctgtgctatacaataggacatctttgtttatctgtttatagcagtatatatgtgttaatcccaaactcatgactgatcctccctgtctttccccttggtcaccataagcttgttttctatgtctgtgagtcagtgtctgttttgtatgtaagtccatttgtgttatattttagattccacatataagcaataccatatgacagttgtctttctgtctgatttacatcacttagtgtgataatctctgcaactagcattgtttcattctttttatggctgagaaagagtccacatacatctgtatgtacacactgcgtcttctctgtccattcttctattgggggacagttagttcgcttccatgtcttggctactgaaaatggtgctgctgtgaacattgcagtgcatgtatcttttttaattatagttttctctgaatatatgcctcggcatgggattgcaagatcatatggtaactctatttttagttttttggggaacctccatactgttctgaatttggatttttaaaaactttttgtcaaaagcattctaggctatgacagaggttcaaaagtaactttaactgaacacaaattaggaggcactgcaatcttgtcgtaactagcacaaggaatctcaaattctgctcttgccattgaatgggatggagaaaaagggaggaagcctttatggttccctttctgagggcttctgaaagtgatattccttagtgtttccagctttttttggaactcatacttggctctgctatctccaacacagactagatccctgaatctttctgaaatttattagtccatgatgaagaggaacagatttgtcttttacctgctttttgtaaccatagaaactagatcagggcctggcactctgtagatgctcaataaatgttcactaaaccagtaggtgaagctgagaacatttacaagtttagaatagcagtgttctgtgtttttaaaagtaagagtgagaaatggcctgatcttatggaacacatatgggacagagcatgctcagtgaagcatgcccattttggattaagaaatatgattatcatttgccagctctgattcctgcctccaggctgataagatgtgtccaaagagtcattttcattcattcgcagacaccaaaacagaaggggtttttaatgaatgcaggagctgaagtgacagtcattagtagctagaaatagacaactgattgcaaagtcaagatgaaatgcttcaataaaaaagaccctcgtgc

SEQ ID NO: 63882 - DNA, 1557 bp, Bovine  19866880862822
  misc_feature (1)..(1): n is a, c, g, or t
nggaagaggcagaaagtattgctataaaatagttttctagcagtaacaggggtaagctagtcagggaagggtggtaagaccattaaggtgaactgaaaacctcttgagatttgtgtccagtttttaaagcaaagccagccagtatagttgtttattttctctgtattgagttagtttctctgggatagggagagaatccaaggataattgtatttaatcaaggctgtagttttgccagctgagtaatatgaaagcagaaagaggccaaggtggattggggacaaatgcaggcgagtgattattgtgtagtgtgatgggtcaggtggatggcaagggaaggtgaagccgcagggcttcacgcagggctgtgattgaccgtgaagaggttgtcaggtcagtggattgtggggccactgacatcgaattgttgaaattggggccttagaggaaatgagctggaaatgcatttgaaataaaaaattggcaatgttcctcaggcccaatctccaaaagaaacattaaaaaaattacttacatttagctgcatggctggggaaaactgtatttttcaaatatgacttcccaactgattttgtatcaggatattcaccctgatattcttggacaagttatgaaaattaggcaactatttctgtgtcttcactcataaaagaagatgagtgagaaggcagaactgaatacttagtgattgttggattctactgaatttcactgctttgttgcagtttaactgacaggctagaattgcagaaatgtcatttcagttaagccattgagcctcacataagaagatgaaattggaatacaaggtcgtggttggcacaacaaaagaagcttcagtgtgtcacaaatgagagatcattggatagatgtcatctatttgattgttaaataaagcacataaagaaatctccttcccaaagatttgtcatgtgtatttatcttgtgaagcatcagtgaatagaaaactttctttggaaatataaaaatgttgtcatcgaagatatggcagttgtaaagtttgttatatatatgaaaatatatttaatgtcacagatgaatcttgctattattttttacagtatcggcatagaactattacaatagtcagattcatttcccatttattgaaagcttctgtaagcattctcacatgcattgtgtttttagggaaaattttagatgattaacatatgttgcctagaagtagagctttctgaattgaaactgaaataagataattgccacttttattaaatatccagctggcacactttgaaaatgttatcccccaaagagagaaaatgtgatctcagcatctagcattggttttattttggattccaacttccctatttattttattctgttaggataggggagttagggttacagattttgtgttttccctgtatgactgatcaagattcctaggtctgtcgactttattccagaaatactgacaacagttatttcttgagatagttttagattgattcctactttaatatatgttttgagggaatgagtgctacg

SEQ ID NO: 63883 - DNA, 1018 bp, Bovine  19866880883106
  misc_feature (1)..(1): n is a, c, g, or t
ngctctgagctctggctttgtggcatgtgagtgttcagtcactcttccccaaaataggatttcattcaccagttgctgtaagttacttgtgacttctaatagactttgcagcagtgattcatttagccttggctcagagagagagagattttaggtgaggagggatggctgggacaggggaggtgggtaggcaggacaggtgtggcagaatccctccctaagggtgataacaaccttcagcgttatgctttataccaggcatgccaccttacacgttatcctggttgaatctctcaacagttctgtggagtaaaaaggcattactgaatacagagggaagttgaggttcagaggggttaagcgacttgcccagtgatatatagctggtaattagacccaagcttcctgtcacaacatattccttcaggcttctccatttcactggacggtacagcgatgttcatattaaacgcctagctgcgatgggactttctcccttatttctctcacatcctgcttttggtgtagcagtgaatccctgccagcttcactttttcttttttattggtttatgacatcatataagtttgatgtgtacaatactgtattttgacttctgtataccctccatcatgtccatcaccaaaaattcagtttctatccatcaccaaacccttttcccgttttgccctctcccgcccccttcccctaaggtgaccactattctgcttaaatacacccagaatctatctcctctgtcactcctaccctgatcccagccagcgtcctctctctgcctgaccactgtgagagccttgtgcctggtctccctgcttctgcccttgttcccctaaggtcagttcccagcacccaggcagggaagtctgtactagggctgcaatctgccttctacccccattatttctccggcctgccttgccatcattctcatgcttgttcactttacttcagtcgtgttgctatccttgctgtctcttcaaaaatcaggcctttgcat

SEQ ID NO: 63884 - DNA, 791 bp, Bovine  19866880891646
  misc_feature (1)..(1): n is a, c, g, or t
nggatggaagaagaaaataaataaccctaaaatttcattataggaaaccaaagcccatgcaaatttgtagcacaaattcatacagtcatcagggtcctggacaaccctgaagcagaacatttaatgttcaaggtcagagttggtaatgtgtcaggcacatagtgcttaaaaacagttttggttggttgatttttcaagtttgacaccaaggctctacagggggcaaagccttccctgaacaaacgtgaggttactgtcagctttatctcacttagtgtgagtattcacagttcgctgcagaaattctagtgtgtttgattaaaaagtgccacatgagatcctcctaaaatccaaaaaaaccccaaattccagaatacatctgtcccagaagtgtttttggtctttttaaaataaaaaaaaaaaacaaacatttgtctctaaagtctaggaacactgggagcagagaagaaaatgtacttattcagtagcataataattattcaatctcaaactatcttttcttcaggaaattaagtacttaaggaaaatcccaagtcattactcacttggggtttcacttttgttacctgaagacaaaataacactgacctatttcaacttttaagtagatagccactgagcatcttccaagcagagctgtttccttggatacgctactctttgaaaagagcttaaaactagttaaagaaatcagcttaaaactgattaaaaaccagcttaaaactagttaaagaaaaaaacctctgatgagattaaataaatgtatataa

SEQ ID NO: 63885 - DNA, 1443 bp, Bovine  19866880977861
  misc_feature (1)..(1): n is a, c, g, or t
nattacatttgcatcctggctggtggaaacacacttcattgtggtaggtctttacttgggttttcttccttggagggacaacccttctatctcagaagttccatctccctgtgtcctggtggctagagcagggatctgttacctgggcttagcccatcagggttcttattctggactttgcccctgaggatggtgttgtagaggccaagggacacctgagagaggtttaaaggcagcagcattgctgcgagaagctgcctgcaggccagtgggccagtgccagctaccacgctgtagacaggtagatcttggggcagccagccttagtttctgcctgggtctctaacccttctgtcagttctgttcttcagctcttcccacacatcccttttctgttgaagacagccggatagaacttctgttgctcacaaccagtgaccctgtgtaattcagtctcaatactgtgtggtttgcgtagtcgcctgacataaacaaccttctgctcacgcaatttagcaatgtctccggtccatgtgcatctctattaatttaacttttatgttgaaaactagtcccttgtggggaagcagggttattttggtttgtgtttaataaatagaaaacagagaaatactattggcactgagcattgaaatataaagcaatgaagttgctgataggtaaagtctcagctaagctccatagatttatttgtttatagtttcttcctatccattcaacagtaagaactagggaaatccatgaaaaagagaaaataaagcaaccaagaggataaatgcttaaatctttcacattcattatgagagtacttcacatttctcaggcaaatttttttccatcgcttggtattatctgcctacacttgcatatttaaataataatttaaacacccaaaaaattggtcaggcttttcttccccatttgattctctgttatttcaattcagtgagacttgttatggaaagcatttaagagttgtaaatgctactaattcattccaaagtaaagatgagaaattctctcaccaattccaggttaaaaggtcctgacatttcttgatgaaattggccttgagtgatcatttattagtaactatcttactccatactgagctgctccccctggaatggctttataacaaggtagagagaagcttcatgggcaccagtggccataaccagcttattgaaaagcaaatcaaattcacctttagcttgagtgctgggtaagatctttggtaggtgaaaaaggagctagaaccctaatactgtttcagctattaggcatcaagtctttcagagttgaaaaaggctttataatcattttcagtagtggtttctctccaaagccctgggtgtgacatgacaggcacctttgtctaagaaccctgtggttagtgggcggaattgccacaggatgcta

SEQ ID NO: 63886 - DNA, 1050 bp, Bovine  19866881244107
  misc_feature (1)..(1): n is a, c, g, or t
ntgaatgttttagatttgagacttcagtgtttcaacagaaccaatgacttatttagggggcttgtgccttttgctcctgaacaaatctgatttgagcttgcaaatagaaaggatgaatgatttagatgtttgaaatctctttagtttattacttctcttcttactgtggcagatagtggctaactgttaataacactgtttttcctcctaaacacagagctgatttacattacccaagctcccttgtagttaggtgtggccatgtgactgagactggccaatgaggtgttgatagaagggataaatacctgcctgcaccatcatttactctttctctttttcttcctctgtttgtagacacagagtatccaggtgagagattgagaatgtgcattttaataaggtccccaggtgatacctatgcacagtaactttgagaaacactgtcccaggagatgacagagccattagcaggaaggagcatgggttcctgccttgtagctcagaggagagccacccaggagagttgcccctgggaagagccatcttagatcggtatatgtactagaaaccaccctttattagtattaaaccagagatttgagggttgtttgtaattgcagaactctgtgcacctctaatacatccccttcttacaaatagcctaccagaatgatctcattatccaaattatttagtataaaagattaaggtagatcttaaaaagtgacatgagtgaaacccttgtggagaatttttagaaatcaccagttacaagacactggaaatttgcatttgccatataattttcctctctttcccttctttccatcttcttttttttcaactgcctccttcacttcccagtagcaccaaagttaatgggttaagattgcctttgcatccatgaatgggtgaggaagccactcttttgcaaaatccccatggaagctgaaagataaaaagatgcagatgtaagaatataaattttcatttctcttaattccattgtcttattttccctgattatctttaatttctttaggccaa

SEQ ID NO: 63887 - DNA, 1526 bp, Bovine  19866881489332
  misc_feature (1)..(1): n is a, c, g, or t
ntatgtcctaaggggacgtgtcaagctgaagatttggagcaagaagattatgagatctggagaggattttggaagccatggaatgcttttatttgcagaaggaaactgagaaatagactcacccatgattattagcgaagagcaaggctgagctctgtgtggccccctccctggggtgtgcaaacacctgctggatggcacagcagagggctcttcaccccagaatgaggaagatggggagaagagggcaccgcggaggccccctactgcctcttggtccatgggggctccacacatggtgggtctcaggccacagacctatccctacacatctaccccgcctccccagaatgggatatgcatagaggatgcacagtgtaatctccctgctatttgaggcaaattaaaatgtaggaaaaaaagtttaatatcatgaacttgagtcaaataaaggtctttgccgatgctttgtccttgagctttttcaactctgaacagacagttgggaatgtaatcagctcctgcctgagccatagggcagcttcgagggaggtagaagaagggaggggacctaattggtatgtcagtgggaagatgctgttgcctcccagtcagacagggatggtcgtcacgcctgcttctgcaaatgctcaaacctccaggcagctctgcagctcctttctgtcttctggacacagtccccgctgctctgtttacctcatcgatagttcccactgtcaaaaatcacatttctcccggctgctcactgtgttgcttgatttgcgccttgtggtttgctggtgtccggggctcaaaccctgagctgctctggcttggcctctgtggagcagccacgccgtgtgctggagacacaggagggggctttgtgaccgtggggaggtgacgcctttgccatcacactccccaagagctcttgtgctctccctgccagaggagccactggaatccaaacacctactggctgagttttatttctagccctgcaaggtcacaggattttacacacacacacacacacacacacacacacacacacaccagatttctgacctacgtgtggacaaaggctttttatctgtccgaattcatatcagatggaagttttctgtctttgctgcacacacattatcacaagtgcaggtggtattattttctctccatctcagccattcccctcccctgaaccttctgcaccctccaccccacccccaggctcttaaatgtcagaggagaatgtctgaggacagcacataactggtgtccaaaaagagatctctggggaacaaaaaggacctgtttgagggcactcatccatatttttaaaatatcttttttaaattgacatacggttgacctacggtgttgtgttagtatcaggtatagagcaaactgattcacattcttttttcagattctttttcattacaggttattgtaagatactgaatacagttccctgtgctatagagtaggtccttgtagtttctctcttttatatgtagtag

SEQ ID NO: 63888 - DNA, 750 bp, Bovine  19866881510272
  misc_feature (1)..(1): n is a, c, g, or t
naattgtgaaaatcccactgaactgtaatgcaaacagaagcaaaaagcacaaatctcagtaattttccttccattttttatagtaaattggtcacttagtaatctgcgagtatacacacatgcagcctgacaatcactcttattgtcgccactctgtatttgtataataaagacaagctgttggtaactcaaattaattgtaatgtgagctacgcttgcaccctatattaggcatataaaaggcactgaatgttggttagaaagaacctcagtagggaagagctagttaagtttcaaggttagagagaacctgattattttatcacatcatcgagatattttcaagaaaattccaaatctgcttgaagaaaggtcttcactccacacaatgcagacgggtttaataatacagtacatgatgctgaaggaatcagcttagtcctgctaagcctcatcctacggcacactcaggtttcccaaatccctacacctggaggcttagatttcagcagtgtcaattcagctttttattcatcaaaggcaaacacacttcagtaacaagcaatttgctctcttgcagagctctgaatgatggcgaaaatgagtgtcgtgtcagcacgtcatggtcaggaaggatctggctttgaacactgcagagcaattaccagggcctggatcaaaacaacaggtaactgagcccttagttatcccaggggcataataaccaccaagcacctgctactcacctag

SEQ ID NO: 63889 - DNA, 674 bp, Bovine  19866881619139
  misc_feature (1)..(1): n is a, c, g, or t
ntgttgaagtgtttagacagccattaatctcatttgacctgacaacaatttatgagataggcagtgtaagtatgaccatgaagcccattattgcagataaaggaactgagattcagagtggttaattaactagcccagggtcacacaggttgggggcagcagattcaagactgaaggtcaagtttcccacctcccaattcattattttttcctttatgcctcgggtggcatttttcacattagcattttctttcattcttaagcacttcagaatataaggtttgtgtaacatcaggttggtttctggtagtacattgattgtggagggccaggagcaagaaaccacagactttaaatgacgggtactcttattggaggtttggcctttattgaatggagggctcttgttaagggaaggtatgcattgatataagaggctggccaatctttcaaacaatggaaacttctgggctccttggggatggctaatgatgattatggaggagtctgccagtgtgaagtactttataaaccctggaggagtggcaggggactgtgtacttctggggagatagatttttacatctcttattctctgggcactgctgcctttggcgtgcacttgttcttataaataagcctgttttgcttctcttttagaaatggtctgttat

SEQ ID NO: 63890 - DNA, 1745 bp, Bovine  19866880350483
  misc_feature (1)..(1): n is a, c, g, or t
ngtgggcttacatatctaccctgataaccctgaagttctggtggaggtgactgattggggaaagaactaaacttagttaacaattaattgtcacactttattcaatttattaatacatttcacaaaaattaaaatttctgtggtagtgaggggtaagttacgaggtttacgcatgattaaaaacaagtttacactggactatctggtaaactgcaaagtttctttaaagttacacctgcatttcagtcactacactacacaaatgattattatttttttgtttttatccctgtttttctggtctgtaatgtgttaaaaaaaaaaaaaaaatgcagaaggaatgctgataagtgtaattaagaaaagttacccaaggatgggatttaagtacaggattaatttcagctggtctgttgcaaccctgtgtttacccttaggtacatacctggaaccaatcatgttgctgacccatggccaaatctaaatgaaacagattaatatagtctgccccagggtcacagacagaccaggggacaactggcaccactagcttgtcagcactgttcacagaacttttacagattcatgggttttacacctggtttctgttacgttcccttgctttttgcctttgagcctggtcatggagcccgattctggctatatgaacagagaagggtataaaagacatctctgtgtaagacggatgcttccctgaaaccaaggtattgtacacagatctgagtggtggtccacattctgaagcatgttctctgcgactgaggtaggacccctggaggtgcctgatgattctgaagctctgtgacatccacctatgtatttttttctcctgctgtacgaaaatttcagtatttattgatgttttacataatataggaccacaaggaataatcattaagtgaataaatgaaggttataaaatgtcactaacaatcactagttctgtcgcctctgcattttaaatggcgtttttgctctccaagttacacctttcccttcatattcttttgcttagttgtctgtcactgctgctgttagctctgaatagcacaccacttctaaagtgctacctctgaagtgcctatttgctgaaaaagcagacattccaagtttgtttgaagtatgttgctgacttaggtcaataagatgagagaaaagtgcttaatttaggtaaatggagttcagtacatcatttcacccagggagactttaaacatttaaagtcaaattaagatagctgcatagtacattacatcaagaagatatgttattttccagatcaagtaaaattttaggcgaaaaatgaatgtgacatggaaaaatgctcatatattcattgttttcttatctgccagatttttaaactacctctagaaaagggattatttaagaatcaggaaagccatcagagactgctaatatgttaaagacatggaacaactgtgaaacctcaaataataaaagaatatgaacatcaaatgtacctttatgtagtcaaccagattttgatattcaatgtagttgcctcctcccaccacaaaaacaattgcctaaaaatgcaagtagaagaaaataggtaagttaaaagaaacggaacagtattttagctctcaagcaacatggcttttagtgtggagcctattccacaacttttgctgctgctgctaagtcgcttcagtcgtgtccgactctgtgcgaccccacagacggcagcccacccgtcc

SEQ ID NO: 63891 - DNA, 822 bp, Bovine  19866880352359
  misc_feature (1)..(1): n is a, c, g, or t
ntatgtaattaatatataaagaggttacagaaaaatacagatcccttctttctcccccttttccttcctgaattgttatccttgccatacatgtgtttgcatagtttttccacaaatgtagatacccacaaactataatctgtccagtatggtaaaacttgcacataatttaccactaaagtgggcttccttggtagctcaaagagtctgcctgcagtgcaggagaccccagttcaattcctgggtctgaaagatcttctggagaagggataggctacccactccagcatagtccttggggtcgcaaagagtcggacataactgagcgactttcactcatcactaaagcatatattttatcaatttaccttacacccagatctccactcgttgtgggaactaatgctccatctttcctattccctctcagtcttgtggaattttaaagtcaacaggttgcctcattcccttttagacactgagacatgtacctcatttagcttgttctctgaatcccacttaagaagaattataaatacacagataatagggcatgtgtgtgtatatatatatatattttccatgcccttttatccttaagaaaagctttgggtgaaattttcagtatgggttttttattgtttgttcttacagctcagttccaagaaacaaaaatccattccaagaggtaagttcatataaaaattctctgtccctaaaatggaaggatgaaaaggtgaccccagcagtcttgaaggatatctttgtcctatggctttatgatgattactgtttggcagtccttgatcaatctgatccctg

SEQ ID NO: 63892 - DNA, 1483 bp, Bovine  19866880440936
  misc_feature (1)..(1): n is a, c, g, or t
nattcccagcagtttatatataatgagcagaaattggaagaaacagatgtccataagccagtgaatggataaacacatagtgataaaaccaaatattattcaacagtaaaaaaaggaatgaattgttacatacaacaacatgtgtgaatctcaacggcattacactaagagggaagaaaagtcagacacaagaacctcatactgcatgatccatttatatgagggtttggaaaaggcacacctccaaggacagagatcggatggaggctgggaacaggaagagaggctcgactacaaagagggcataaaggaacttcatcaggtgatggggatagtctggatcttgtgatattggttacacatttgaatatacttggcaaaactcattgaattataaactttaaaagggtatatcttactatcagtttcttacacctcagtaaacatgacaaggaaggaagacaggaaagaaggaaggaaagaagggaaaagaataaagaggaaaggatagaaagaaaaccaggttggcctgctcacaggagatcttaaaaagatggagaaccaggtttggaggctctgtagccaaaacccaaaatcacgctggggtgatggtgaggcatcgtggctgacgctggtggagacactatggcttccaccactgcctcagaacagtggacaccaggcattgcccctcaggggcttgccctccgctgcctctggaaatgaacagctccatttccagaaatggagttttcttggggtccctgtttcttcatgtcatgattccggtctggaatggagacatctgattggcagagcctaggtcacatgcccactcctcatcagcatgggagactggcagagagagtacgtaacactttcagcttctacagagatgaagaccctgcattctcaaggtggggaactcctctcacacaggaagcaggttcccaactgtctctccagcataattctcttctgggcagccaagaagcgtgcactgtctaccacaccccccacgtcacgactctgatgaagaattttagatgaatgcacagggcctgttcctctggcgtcagcatcctcttgccccactgcctgactggctctaatcactcaggagctgtcattgtcccctgcaggttgttcttttcatgtcctccttccccgtctccatctgaggagctcctactcatttatcaaagcccacttcagggaactctcagccaactcttagcctctctacactctgctctaggacagaatttagtaggtatgaaattaatgtttggtagatgagaactgtccttctccaaaatcaaagaagagaaagatgtacttttaaacataaaataaataacatttaaaactctactcatatagtcaaaagtaatagcataattttttatgttttccagaaattctgaaccaacagatgacctttggctcagtatttttattcctcactgtgtccgaagattct

SEQ ID NO: 63893 - DNA, 4647 bp, Bovine  19866880469224
  misc_feature (1)..(1): n is a, c, g, or t
ncagttctaactgttgcttcctgacctgcatacagatttctcaagaggcaggtcaggtggtctggtatgcccatctctttcagaattgtccacagtttcttgtgatccacacagtcaaaggctttggcatagtcaataaagcagaaatagatgtttttctggaactctcttgctttttccatgatccagcggatgttggcaatttgatctctggttcctctgccttttctgaaaccagcttgaacatcaggaagttcatggttcacatattgctgaagcctggcttggagaattttgagcattactttactagggtgtgagatgagtgcaattgtgcggtagtttgagcattctttggcattgcctttctttgggattggaatgaaaactgcccttttccagtcctgtggccactgctgagttttccaaatttgctggcatattgagtgcagcactttcacagcatcatctttcaggatttggaatactatgtattattttccactcccataaaatggtgtatcaagttatttctcagattggaaatacttctaacaagatgttctgcattttgataaacttaactctgcatttcttaaattaggtttgttaaaccttgttaaacatctgatttccaatgaaaactgtgaaagacatacgcagatagattattcttgcacatttttccctcaaatattctgtgttagggttcaagtgataagtgtgtaagtacccttacaaggtcaaatacaatgttacatattttaaattcagatcaaactaaaggacttgagaattaaattttgatttgctgatggctcctacagttttatgtcaaaaaagaaacaaacaaataaacaaaaccccactgggacaccgaggaatcttactttatacaaatgtctatcaactttcctggcagtcataagttcaatgtgccctacggggacccaggttcaattcctgattagggaaataggatcctacatgccatgcagccaaaaaaaaaaaggaaagaaaaagaaaaatgtctattaatagttcttaatagaacttaatacaacttattaagtctatagaaaagacaattataaattaaagtgcaaaactcaaattatggaaaatgtttctataaaatcatcactccattaatttatctgcaattaatttgtttcaacattataaagtcttttactctaatgttcacattacatggggggagcaaattcgtaacgatgtggatattttccttaaaaatatgtaagaaaacaatactataaaactacatttgtacactcacattattaagatcttaattaaagtgtgtcctaagttaaaatgaagcactattaaaagttacatgaacattttttagtcctaaggatatcgctagagaattatggctccattttgcagataatcactttgaaagaaacaatgaaacataaaaatggctgtattaaacttaaatttggggatcagtttactcaaccaacagaatccatcttttttgttagttacatggccacaactaactctaattcaagtaagtaattaatgatcccaatatttgatggtggtcatgaaagaactccactgctataacctgagaggcattattcaccctttctgataaaatgtgctaataacccaataaaactactcttgaagacagataataataatagaaaacacttacacagtgtttaccaatcagacaagtgctattttgaatactttacctatattcatttaatgcgcataatagctttatgagttagggaatgtttttatctccacttcacagacgtgaaaacttagtcactcgccaaaggtcacaaagtaaaatggctgaggaagaacccaatcatgttagctgggctccagcatctgtgttctcactcactgttctgtatctccaggtttgcctcaagactccagtgattcagtgacagctattattgtgaccatggacgcgcaatttcactccccattcaccaccgtaaatcaagttctacccagttgtatcttctattcaaaagctttcacttgttaatatgcatatcttggcagttttcatcttgactccagagcatatcacaaaaggtaattgtaattctaacagacaatttgttcttagttgatctcaacatgcagcttaaagtctgagaagtggctcaatcagataatgtacaactttaagacaataaagctcctgctgctgcatttgtaacagtgtgtttaacatttgtgattagacctcaactcccaaaattcttctgacttattctcctagtgagttcagctaacctccctttctacttccaataaataaaataaacctcgcaaatgctgtccaggataagtttgcagacatgtatttgaatttagtatcattcttgttcagatcagatgtcagggtaaacagagagcctttcaggtggcctgcctggtggccctttacccagcgtcactttttgcttttctgaacttcacaacaaagtagagcaacatggtatactcctggccaaaaatgtaaacaagagattaaagctgtcagatgagagcctcccaaccgtttccagtggatattcacacttaaatttatactggcttatatcgcacatctaagacttggaaaagtcacagttattttaacagaagtcaaatgagctatttcaatagcaggaatctgataaataaatgtaggtcaactagaaggcaacttaaactttgaaacaccaagagtgcagagaagtgagggagagcaaacagtacaggagcagttttggaagttcctaggatcttctcacagaaaacagtaagagccaagaagaatgcaaaaaaagaaaaacctgtacagcaatatctttaccaaaaaccaagtgaaaaacatcccctggacctctggaacactatctactcttaacactagaatgaggagaccacagctgtgctattttaatggcagaagtggaggtctgaaaatgtggtcttgttaagggtcaaaagaggcttcccaggtggctaagtggtaaagaatccatctgccaatgcaggagatggggtttcaattcctgggtggggaagatcaaggaaatggcaacccactatagtatttttgcctggacagagaaacctggacactttttccttggacagaggaccctggtggggctacaagtccatggggtcacaaaggagtcagacacaacttagcaactaaacaataacaacagtcaaaatagccaaggagcccagtaccaagtcaccattgaaaggaagggtgaccccctcccctgcttgaagtgagaaccccaggagagaatctgagtaccacactgagaacttggaggatctctcttgccaatggtggtggtggtggtttagtgctaagtcaagtccaactctttgcaaccccatggactgtagcctgccaggcccctctctctatgggatttcccaggaaagaatactgaagtgggccgcgttcccttttccaggggatcttcctgacccagggatcaaacctatacctcctgcattgcaggcagactatcactgagccaccagggaagcccctcttttgccaatgagttcaaggaaaggtcccatccaggatcctggaggctcagcaacatccaggggaagctcttttatagaaagacagacaccatactgagcagaaaccgttggagtagaacacgataaaatgtttcaaaagacagttagctagttcagctaacactgacaatagctagatcaggctgatcaagtttagtacattacagtagtaaaattgagacaactgggcattctgtgctgcctgctacggtgcaacagaaagtacactgcagccccagtagagaagtactttcatccccaaatattaaaacctgaaccaaacccagtctctagacctaacttccagcttacggacaatatggaggagaaaggaatatgctaaataatacaataaaaatgcaatcagccaaatgtgggaaattctacaggataaataatctcatcccttcaacaaataaatgatacgatgatgtggggctgagaggaagacaaatccaaaaaaaaaaaacaaaaaacccctaaagatacagtaaataaaggaaatatgtaggttttgtttggatcctagtttgaaaccaccaacttaaaaaaaaaattttttttaagataaaacggggaaactatagactagggattagactgtataatggaatcacaattttaaagatgtgataatggtattgtggcatgttgaaaaaaacaaaggtcctactgtgttaaaaatacttggagaaatatatgccaatgaaataaaatgatgcttggcatttactttaaaacattcccagggctgggcatgggaaggagtgtgagggaggccgtgaattccgtttcagggtatctttgagcttgctgagtatacaccattagcaaggctcaccctcttgagttgaaaaaaatttatggacaagaagttatcactgaaattaaatggtgatggacatgtccaagaagtctttggggatttgattcctttatgaatcatgcaatatatgcatgtgtggagatggcaacggcaaggacagaaccatagggaaggcagtaatgtaagaaacttgtctc

SEQ ID NO: 63894 - DNA, 1280 bp, Bovine  19866880676285
  misc_feature (1)..(1): n is a, c, g, or t
nactctaacttcatcagtacaccacccaccatggtgtgatacgttttattatcaacacagtgccactgccctcaggaggacaagtttgcacatttccagacaccagggacacaatcttcacctttaactactgagattgtcaagatactctgaaactgccctgttttgttgacagtttatagagtggaatacaaacagctgacccaggcccacttggggcatcagcttggtaacagcgactaaagaccaataatggtcatgcagcaaatacctcatgcaaggattcgaccagcaatgctttctggtaacacagagctcaatggcgccaatctactctgccacacaggcagtacactgtccaaaatacatgggtcatccacaaaatatgaagtcaaattaagaaggccagaattccccgtgaaaggccagcagacagcatggctccagcatggcatcaagctccagaccaacatcaacttctataaaaccagtggcagcatctaacctcttgtgatacagggcaaaactgtgacctagcacacacgccacatctgacttttccagcagttccactagcgtcacctttcagcaccctggatactagataccagcacagatccaaagtcccttaaatcctgggatgtgattggtccaccaaaattaaagccacattttcttacagtgtacgcccaagggttggacgccaacaccatcgaatgattccagcacaacctttgggaagttagtggctgggaaagagcacagggaagccttctggatggtggctacagaggtaatacatatgcacacacatacatatgtgcgatttctaactagtacaacatggatttcacattaactgggttttagaaccagaatgttcaggttaggtttctaggtagattattttggagcaggcgggtagtggataaatcttagtctcttactctactcaatatccttactctaatacctccccaaacttctctgctcctcacggacacagctgaagagtgaaagcaaataccgcaccaaaccaacaacagtgttgtcacatcacaaagacaagagaaaatctctactctgtgatttttttcccttagaagaatcagaaaaatagtcacacacttactggaacagggtaagaactcctctccaattttctatgtcttcacccaaaggcccttctgctacagaatggcaaaggagagagatttaaaactaagccagctgaactacttaactgatgaggcatgcccagtgaggcctgcaacctgtaa

SEQ ID NO: 63895 - DNA, 899 bp, Bovine  19866880726378
  misc_feature (1)..(1): n is a, c, g, or t
ntttagtggtaaaagtagtgaactgataggcatatggagtttttgtttgttttggtgtgtttaaaacatacattcaaaagtgctttgctaaaatgtccagtggaaatttagcacaccttaaaaactttatatctttatcatttaataagaactaagaagaatcatttcattagctttcaaatacttagatcaaatgagtcctttaatctgttttacctaatcatcaaggtaaacccaaagtcctactaaacattaaaatgaggggaaaaacaaaacacacaaagaaactaccatgttgcaacattttacatgaaaacaaaaattaaataaattattaccaaaaatccaagggtacaatattaacaatacagttgtcatttagaaaatcagcatgtgacatttttcaaggcagcaagttaaagtacttttcaaaagtctgaactaaagacactttgttgatattgataagaggttaatctttttacctttgtttctccatctctaaagataggctgtgaaaccacttctacagcagtcaaaaggttattatagaatttatttgcttacatactttaaaagtattaatgagaataatccagcccaccaaggccgatgtctctaaaaaccattctaacataaagtataaaatgtaggaaaaaatatgtttataaaaggaaaaattaatttgctgaaaatctgcaaattcactaatataatctaagtaagtatagttaactctcaattgagtgtttattgtctataaaaaatttaatccaaggactagtttcacctctaacactgtcttttccatcccctcctcatcctctccccatccctcaaattaaagacgaagtatttaggaaatgacaaactaactttaacattatcctttaaaaaaa

SEQ ID NO: 63896 - DNA, 1306 bp, Bovine  19866880733425
  misc_feature (1)..(1): n is a, c, g, or t
natgatgttctagaatatttaagactaatttatggtgggaagacatcaagacaatgttttgggagcaagttttgactaaaagcaaggactgactggcaaaggccataatggaactctgtgtgaacttctgtgccttgctatggtttgggttactcaggtgaacaatacctctgacagaggcaggaatgaacactcaagatatgtgtatttcactgctgtaaattttacttccagagagtaacacaacaactaaacaaataatgaaatctagtgaatgatattggcactgatgtattaagggggaagtgtactgatatctgtaatttactctgaaattaagctggagtaatgaacagaatggaaagatggacaggtgcttataaagcaaatgcaataaaatgttagtggggaatgtaaatgtattcactgtaaattctctccagttttcctgtatgtctgaaattctcataataccagtgggctaccgcattaaggttaagaataaaagaaccatatgatagtgggtaagaaagttgtgctgggaaaaggtgctaaaaacgagcagagggtacagttatgatttttatgatagccaaggcaaaggtgagtaaatattattggtcagcctactaagcctctgaggcagtttaagctttaaaaagctgaagttaatattgggaacaatagtcaaagaatgtaaagactttctatgcctcagcaactgccatcattgactttcaaggtgaatgacattctgttgtatcaatcccccaagaaacaatttctcagtccaatttgtgatatgactggcaaagtcagaaatatggacagtatgtcaaggaaatgctggactgaattttgcctaagcaaggacactactccaattaaaagttttcagaattaaatttaccttttcatagatttgggataatggaaataacattacacacaagagtttcctttagagttgtccatggcaaaaccttacattcttctagttctgtggctttttgtttcagctggctcagatgaataggattatcttgctctcgtttgaaaaatatcaacagcaacttaaggtatgttaaagaaacaaactaaaaagtacactttacctgttttatgaactgtgcagcattaaaaagttcactgcaaccatataaaatatgcttgccttgtttcccctgtaaaagaatcaaacacagaactcacatacaaataataagtaacattttcaatattcccaagaagaggggttaaacataacaagactttttgttattcttaaaggtttatttccctttag

SEQ ID NO: 63897 - DNA, 1206 bp, Bovine  19866880798560
  misc_feature (1)..(1): n is a, c, g, or t
ngatgctagtggtaaagaacacacctgccatgcaggtagacgtaagagacgcacgttcgaccctggcggagggcacggcaacctactccagcattcttggcctggagaatcccatggacagaggagcctggcaggagcctgaagtccatagggttgcacagagttggacgcgactgaagcgacacagtaaacatgcatgcagcgtaacaggaatacaggtggaaattttttaatattcatttaaatgaagacatcttcgttcaaaattacaaaatattacctgcactgtagagaatacttctacattcgcaacattcccaattttgttcccatgactgtagtgaggaacaggctaaatgtgttccgctagaaccacaacactgacagcgctttatttcccatttgctgaggacataaagagaagcagatatttacatttagtattaactttgtctaatttcaacaaccagcgccaccacatgcctcactgtccatctcacacacacaaccaaagaaaggaaaattatctgatttgatactgtattactttttcctagtgctttttttcctatttcatttattacatttgtaatctccctctttgaatagtctctttttaaaaatatttatttttgtttatttattattggctgcattgggttttcattgctgtgcacaggttttctctagttgtgaagagtgggggctactcttcagttgtggtgcatgggctaatcattcaggaggcttctcttgttgcagagcatgggctctagggctcacgggcttcagtagttgctacacatgagcttagtagttgtggcacacaggcttagttgtccctaaggcatgtgggatcttcctggaccagggatagaaccagtgtcccctgcattgcaaagcggattctgaactattggaccaccaagaaagtccaatattctctatctaaaaataggtaagctaaataacaatgtgaacatgcacatatatccaagaatataagcactgtaaagaatatgactgagaagaaaaaaattttcttttatacttggagatgattatgctatatagggagactgctatgtcaatgtgtctgataaggaagaagcattcagtaaatacactgtcttacctaaaatactatctttcctattcaaggtaaggaattatttcctataataagctgctcagatacctcagata

SEQ ID NO: 63898 - DNA, 1870 bp, Bovine  19866880961039
  misc_feature (1)..(1): n is a, c, g, or t
nactaaattggttagccagtcccatcacaatgactattaaaaacctacccccaataatttggtacaggggatttacttcaggcattttaaggcagtttcgtgtgcaactgtgtacttatgtgtgaaaaatatatacatgtaattttatgcttcctttggttaggaagatcccctggagaagggaatggcaacccactctaggattcttgcttggagaatccccatggacagaggagcctggtggcctacagtccatggggttgcaaagagttggacaagactgagcaactcatgttgtaattttatgcaactgtaacttggttttaattcacttaaaaatatttccattgtaggtatcaccatcttctctgttggtgtggcttgggcacctctggatgacctgaaagatatggcctctaaaccaaaggagtcgcatgctttcttcaccagagagttcacaggattagaaccaattgtttctgatgtgatcagaggcatctgtagagatttcttagaatcccagcaataatggtgacattttgacaactgaaagaaaaagtacaaggggatataatgtataagttgtattctaataatattgaaatactacatagcatactaaaatcagagaaaactattatattaaagatgccaaaaatgtaagcaaataagcattcatttaaagataccttctaattacaatttaggcttgattgttcagaacgcttcatcatcatgatccttagaatctcaggaaagagacagtgtagattattaagagttctattttaacatgcatattaaatgtataaatatgcaaattctatacagctcaataaaagaacttgatatttagacccaaagcaacattccttctctaattattacatatataaggaaaatgaaagacaaatagaaaaaagctccttaaaatatattttgacccaagtagatgtcttaaaagtcaatcaacaatatagatgttacttaataccctaaagttgtaattacagatgaaatagaagcgatttaggtcaagcctcttttgcagtgtattttcaaaacttatagcaaatatcacactgaacaagatggcagcatttgcctggtatttttctatttatatccttagttttatagtgtattgatgtatttggcttgtactctacaagtcaccaatgtattgaaaaacaattaagttggtaaaattttacttaccacttagaagcatttagctttaaagaaaagcacatcttccaaacagccgaactgcagcaaagactatttaagcaataaaactgctagtgacttcaggtgcctgacttaccattctacgtgtctctccctagggcatggtaaaatttctttacttcatgtggaaagaccaactgagttttttcttaaaatcacatattaagactttttttcaattacttattgaatgccttctgttctaggcattattcatggccagtaccaggttaaacagtaggaaatacttttgagtactttgttcaacaaagttgttttgttatgaacagtatttttactgttgtgaagttggttcttaagaacagcgatccaaactcccttaatgtaactatcattaccccaccaagaactctccccagatagacgtgctgtcatatcctatcccatcttctctaagaccaagttttctatttcctctcacacatacactgatcttatatgaaatggtttacaaccacccaaaccagtcaacctgcaaaagatgttaactggttggaatatcactccaataaatgttttgaatttaacaattttatagtctgtgtaaaaggaatgaaagggctatgtatcaaaggcagaagtgaaatcgtctttgaca

SEQ ID NO: 63899 - DNA, 1075 bp, Bovine  19866880976124
  misc_feature (1)..(1): n is a, c, g, or t
nctctgtaatggtaaacagaactttccattctgtgtgttacttgggatcttttaaaaatcaaaggaaacagtgggcagtccaggtgacatgggaataatcggggcttgtatccgaaaaggctcccggcaggcgcatcctgggttccattactggctgtccctccccgtccctgctcccgtttgaagcggctgggcagactgcctacacctggaagccgataagacacgctcatggcacgctctcatagttttccaagaaaaatagcaaagaatgcccttgtgttgaggtgcaggagttgctgactggcagggtctctctagaatcaacaggcccacatttctgcctcctcatgttcccaagttgattctcagctcaaaatgagtaaaaaccgatgtgtttttgtaaatcaacaagtacagacccttcactcctttaaatgttgatgtgccaatttaaaaatattggcctctgctcagaaaattactctgctgacagtgtttgcaagaaagggattgtccaaacactggaagtagatagttatagctttgtttacatttgttcatattaacgataactcagataataattcttaagcagcactatgagccaggctctgtggttggtacagggatcagggcagtgaatgagtgtctaccccaagaagcttcgctatttaaggacaggacatggttattttcgaggtgatattgcatagaaaaactgaacactggcagtgtgggtttaaaaacgttgtgtggcattatattttgtgtatagcttctcagagactttcttttcatcgttttgttggggaagagtaatgtcaaaattactattctgagcgaacataattaaagagaaaactgaaactacagaagtttgtgattgtagcagaagaatttttttttcgggtgtctgcctcagagcacatccatgggatgtattcttactgcaggaaaatttagctttggtcttctctcttagagtccctctttctgtgtttttggattgaggaacagccatttgtaggggatgttctgtacttctaattcaagcagacttacatacccaaag

SEQ ID NO: 63900 - DNA, 1761 bp, Bovine  19866881149183
  misc_feature (1)..(1): n is a, c, g, or t
ncttgacaggctggagtatccacctccagtggctcacttatgtggcttttggcctcagttctcttgcctcttggcaggaggcctcagttccttacttcctgggcacctctgtagggctgcccacagcatgacatcaggcttctcccagagcaagtaataaaagaaagggatagatatacaccaagatggaactatatgacctagtttttataatcatataccactattacttttcctttattctgttagaggtgagtcatgattctagctcacacttaaggagaaggaaattagttcccaccacttttaagggaggagtatcaacaaatttaggggcgtatttttattcttacaacagcatccatgttaaaacttagatgcttccttgagtaatactttaacataaattcttggtgtttctctaaggtttgtaaactgatctaggaacctaattactttgtaccaagacttaggggaacatgaagttgatattccagattatttgtcttaaagtcatatagggcttagagtcttacagggcttcccaagtggctcagtggtaaagaatctgcctgccaatgcaggagatgtcgattcagttcttgggtcaggaagatcccctggagaaggaaatggcaacccactccagtactcttgcttgggaaatcccatggacaaaggagcctggtaggttacagtccgtggggtcacaaaagagtcagacaggacttagtgaataaacaacaacaacactaccgacaacacaaagtcttaaagtttgtatcacaaaagaaaacctttttatatttctaaacagttcattttactttttatgtaatataattagaagagacctattttattattagtcagtgtgttggtttttttttttcccccctgtaatttttaagtaatctatggcccttttgggattttttaagatacactgattaaaatctctaatcacaagtctgaagtattactgagttatttaatatatttaacttggtcatatcaaaatttcccttatgttcttccttattttattaatgagtgtagtaatcccaaaacacgttgaccctagttcaacacttacaggactggtgtttcattgtgaacgggaaggtatagtaatattataaatgataatggaatattagagctgagacttggaaacaacctagtctgttgtttttatttttgtgtttaatattagaaacactgaattacttgcttagggctccagaaagttgggctcagatcctggtttgcaagccagtacttattcacagcctcatgctttttcttgattcatgttcccttaatatatttaaactgaggttaaaacctattttaaaaaatttattttcattaactataattcaatagattatctataattacgtcttttatgattcagaatccagctagacttatagttaacctgaaatatcactgataattatctccatagtatttattactattacatatacatctttcagtatatgccgctttttcccgcctaaaacttgatcgtaagtgtttattgtttgtcttccttccctttccctgttattttctatgatactttttagaaaccagtttggttatataacatgttaatatatagtgtctttgaaatcaaacaatatgagtagcctcttactttgactatgaaaaataactattataggtaagagatacttgaaattagagtgttttatatccatttttattggaatattatagatatatatt

SEQ ID NO: 63901 - DNA, 1207 bp, Bovine  19866881238164
  misc_feature (1)..(1): n is a, c, g, or t
naatgcaggcactcccacaatttcaaacatcattttcactgataggttaccctctgaaatatatgctttggaatgagtataccgttagatacttttgaagcattctaaattatcttagatcttaaagggaacccaaaagtaacacagtctcagcttcatttttattttatccacaaaggtgctttgatactttttttttgaatgtcggaaactcctgagaggctttgaaaaatgtttctcagttctttcaaatagtaagtgattccttgaaagatctgtctgagcagaattatactggctctgcagtgaacctaaagctgtagaatggtcctggatttaatggtttttatcctaattgcaaataaaagcctcaaacccttccattatatagattgtcgaatggcttcccatggaaaaaacgccataatcaaagcttgcagcttcaggaattccctggcagtgcggtggttaggcagagaaggtaacggcaccccactccagtactcttgcctggaaaatcccatggatggaggagcctggtaggctgcagtccatggggtcgctgagtcagacatgactgagcgacttcactttcacttttcactttcatgcattggagaaggaaatggcaccccactgcagtgttcttgcctggagaatcccagggatggcggagcctggtaggctgtcgtttatggggtcacacagagtcagacacaaatgatgcgacttagcagcagcagcagcagtggttagtactcttccctttcattgccatgcccatggttttgatccatggtcagggaactaagatcctgcatgccacacagtgtggtcaaaaaaaaaaaaaccttgaagcttcattcccaagtatatctgaatgtcatagagcaacatatcccagtgcaaaaagtgatacagttcttaatcacgtttggtcaagcaaacccaaaagtctaaaggaagggcaacactgtaccttcatcctgctggttgaattcctatccacccagcatcttcctctccctctttatataatgacatgaggggagagatgaatgggaagtgagttgttttctccactagtcaatagtggtaagttatttattaattcttacaaagcactatttacaatggatgatttttgtttcgtatctgtcacataaaaaccacctttaaataatttttaaaaagagcctgtgctgtg

SEQ ID NO: 63902 - DNA, 935 bp, Bovine  19866881249631
  misc_feature (1)..(1): n is a, c, g, or t
ntatattaaaaatattttgtttgttttctctttgttaatttctttttagcaatacaaaagttgcatttttgtgtggctaaaatttagtttctttgcagtctttcattttatactaactagctttgaagtataaaattttagatgtcttttttctcttaatggaaaattattagctcaattttaaaattactctataaatactataggcatgtaatatattcattttatattaatacattggcttgttattgattgaaagtatcatgtagtatgtccatattttttttctcacatctaattatgtaattgtaaatgagctagaaatatgtgttccaaacatatgtgtatgaatgttggctcattatttttcttctctttaagttttaaacagggtctgaaaactcttggtgttttggagaaaattcagacttacccagaagcattttttcacatcttctgtcataaacctgagaatctttctgcaaaaatacttagtgatctttttacagtacacacattgtctgatgtacagactttggggttttggaatagttacttacaggctgttgagggtatgtagatgttttattttcatttaacttaaaaatttgttttgggatatttatttctttgagttttgcttttcatagtaagactttcatctgataactacaatacttatttacaaaacttgtttaaaaccaagttatgacagtttaaagtgataaggaaagattataaagtttatatttcacttgtttctgtctcattaatttgagatgagagtcattcttcttagaaaactttaaatatatgggtgattgccacagcataggagagtcatctgcttcaaagctagtcatctacttcatcttttcaaatttttaagtcaaattgaattattccaaaaatgaattggtcagaatatggtaatg

SEQ ID NO: 63903 - DNA, 744 bp, Bovine  19866881283218
  misc_feature (1)..(1): n is a, c, g, or t
naaatagatggctattaactatcatcagagtcagctgaaatcggagcgtaatactggcataacttttacttaggtcctgaattgatactagcttatgaaagttttaaattctaattaaagctaccagtgggtcaaagtaattcccttggaaaataccattgggagtaatttcagtgcctgcttcacttattttaaaagctaggcttaacattctaaaacataataatactataaaaacaagaacttctagttggatttcagttgggttcccaaagttgttgcttttcagccttttaataatcagtgtttcatgaccgcattattttttctaaatatacaatgtagtttttctaaggtttacacaatcctcccttttttgtactaatttgcttcatttttatccttagcttctcctcttatgggtgctcagagtttccctaatttgaccacacccggtactacatcgacagtgactatgtcaacatccagtggttactggcagcagcaatgtagctacagcaacaacagttttatcagtgggtcagtctttaagtaatactttaaccaccagcctcacatcaaccctccagtgagagtgacacaggtcaggaagcagaatattccttatatggtaagttacagtatcaaatattgatatttatgtggtgatgtttttatcacatttttctcctggggtgttctaaattttagattagaaaaggatgattcctcctcttataaata

SEQ ID NO: 63904 - DNA, 1387 bp, Bovine  19866881333596
  misc_feature (1)..(1): n is a, c, g, or t
naataggttacaatgcccataaaattggactccttcagtacataaaaagtattagtagctattcaagaatatagtcgtctctaaatgtccagtaggctaagtatgcaaaataacgcaatttatttgctttaccagtcatatcataaggaatgtaatcaaataaattcagtggttaagaagacaacatagaaagtccctctggagattgactgtcattatttcccagttacttaagtttttcaaattaaagatataccaatttagatattcctcttttaaaaaagtgtatttttcttatccctcactgaaataaatgaactatagttttacttgataactgtatttattttattttcatatatgaccactttgacagccaaataacatagtgaggctaagtattagtgtaactacaaagaataataaacagaaagctctacctgtcatcagacatcataaaattttttacaactgaatcattgctcatctttgaaagggaggaaagtaaatccaattaggaatttggggtgattctttgaaattaaaaatatgttttctatttctttttacctaaaataatgtgacaatacagatcaagaataggaacaggtaaaactacaattacaaacattaaaaataagtcctatatatgacataaatacgggacccatttagagagagaaaatacaagcatcaagcaaggctgatattcctgctactattaataatcacaattattgaaatgtccttataaaaagagtatttcaattaaaggaataaaaaaatttcaaagctgaaagagaccttcagacaaccagttcctttcctttacataagagagcaaaccaatctgtaggaaaagacgaaaaagagaaaatttaaattctcagactgaggattattttttcctttggaaataaaaggtttaataagagaacataagagggaaaaatgctgttttctatatacaagtactataagctaacattattttcttaataaacacccctagtaatttgatttcagggtggctaatattttttaacaatatatttgaaaacaaatgccatttctagaaatatgttaaaactcacagatgcagagtgattcccatgtctctcagctccttcacagatagcaaaggggagatgatatcttggccaaatctgtcataaatgagcacctagttaaaagaaagagagtcacatgtttctaaaatataattatcaataaacagtcaatagagaacccaatattaagatactgttgaagtacattttattttgttttatttttgccacactggactgtcagttccccaaccagggatgaatctgagacccctgcagtgggagcacagagtctaaccactggaccaccagggaag

SEQ ID NO: 63905 - DNA, 1598 bp, Bovine  19866881468734
  misc_feature (1)..(1): n is a, c, g, or t
nactttatctgataaaaaattgcatctgtatcttgcagaatcttgtgtcatagatccaaagcccctcttcatagtcactattaatggaaaaaaaaattccctcttctatttgcataggcagggatgaacaagctttttcaatgaaaagctgaatagtaaatatttatgactttgtgaatcatagagtttccattttagttactgagccctgcagttgtatacaagagcaaaggcagccatagacagtatataaacaaatggatgtaattgcattctaataaaactttatttacaaaaacagacattgggctgaatttggtccataggctccagtttgcagatctcttatgtagaagaaagtgggggcttcttgggaagatatctttctatgataactttaaaaatggataagaataaacacttttttattttttctacatggatgttttccttgccttcttactaccctgagtgggtcaagtgatcgattttgcaaaggttatttgtctctttactctattttttttgctgttggcttttttgtttttatctttttttggccgtattatgtgacttatgtatgggatttttactttactagatattgaacccaagcccttggcagtgagaacatggagtcctaaccacgaaactgtcagggaagtccctgtctctttccctttttcaattttattttcttattgctaggacagtgtatttgaggcatttaaaactagattagagaaaatttcacagtcacttctaggaacaattattttcattattgactacttctgttaagtctgatatcacagaaatatttacttattccattaatttcatcagttattttcaatcagtttaaactctttcatttgtttctcttatttctgttacagagaaagagctcataaaatgatattagttattgatataatagaacagctaactactggaaaaattttttatacctcattactgtgtctagattactacagctgttgtcttaaaaaatattctttaagcagattaactgaatcaaaatttgaagtaaagcagaagtgtgaagtgaataaacttctggggtgagaggctggactggggcatgctgaacaatgtctgtagtcttttctagcacactctctagctatataacccagtaaaatccccttgggcttaagctggtctagatgcatttctttccacttaaagaatcttagctgaaagaggggatttcatattggtattgagattcaaagggtaatagatagacaagggagggattggggtccaggcagagggaagagcaggtgctaacagatgacaaggactttcttagtgctggaatttagagtcgaaaggcatcgaggcaggcgaaaaggctggatatgcagaccaaatggtgaaggacacgcctttccaaagcgtttaaagtgtgtcctctgtgcagcattgttgtgtcagtcactcagctgtgtccgactctttgtgaccccatggactggggcctgccaggcatgcagtgaggagccatgaaagaagcttgagcaagggagcaatatgaacagatgtgggctaggatatttgttctgatggtg

SEQ ID NO: 63906 - DNA, 1320 bp, Bovine  19866881518722
  misc_feature (1)..(1): n is a, c, g, or t
nttactttcagttctcctgttacatattaaaaaaatgaatatcatccttaataattcagatgtcataagaaatgtcattctgattcattgtaattctaacctttgaggatataggatatattagagttgtctaaacaaagcttccagcagattatagaattctgcagatgagaaaaaaaaatgatataaatatttcttctccttagcaaactatttctgtcagtgacaaataagttccatatttagagttgtcaaacaaagaaacttaaggtcatcatctccattatagcaaatctgtgaataatatttgttaaagtcctggaaatataaaagctgatgcaaagaatacacgaattgaagagtacagtcaaactgtgccccaaacaggctgtacaaagtacttgacttcctcacgtttctcatcaccctgttcattaccagcaaattttaccttatggtcaaaatttgaccatgagcatacagttttctatctgtatccttaacattctgagagataaatcaagaattgttctctgtactgtttttagccagacaggtctttgagaaaaacgcagttccatcagaatccctttttaccgacattctgaattgacttgtcagatcctggatggctaccagtgaacaacgggaagacctgggaatttaaactaaaggtggccttgctatgcagtatcatcagttcattcttctaatgatgaaccagctttatttaaccatttggatctgatttgtttactgtctctaggttgtaatgtagttaataaaaatgaagagtgaattttcagatttgttactagctttagctactctttaatgacttaagacgataaaggttctagggcagaaaatcaaaggcttttggctctttccagactatagatcttaagttctgtagcacttcagagatgatggctgctgccaacagaacttatcacaaatcagaggcatttctcagtgtgacgagtctcgcttcttcctttttacgtacagtacagtgtcactgcactgaatcatcctgcacacagaatccagtgtgagacactatacagttcatccattagctcaacaaaaagtaagtatccactccgccagactctattccaggtcctgagataaggatatgaacaaaacaaacaaaaattactactttcctggagctcacattctagcgaggtagggtaagtcaataaacagaatatgtaaaatataaaatattttggacagtaagaagtgctgcaaaaaaaataaattatactttaaaatgaatataggaaatccaaacaaggttggtagatggtt

SEQ ID NO: 63907 - DNA, 1983 bp, Bovine  19866881535224
  misc_feature (1)..(1): n is a, c, g, or t
ntgttgacactgttttgcttaaatttaggatcaaatttaatccttctctgaaaaataatctagatgaaaaatatatgtacgtgtgtgtgtatatatgcatataaacacatatcaccaagagtggactgctttataaaataaaatattccaagaaagaacaaaacaagtgagttattttttaaggcaatttaaagcatgctagtgacacagcaaaagcagttttgttagtgttgttcctgaagttagtacaaaggtcctcaagggggaaaaagagaagtgcatctacaactagaacaggctctccgctgagcaatgaggtagaagccctggcatttctctgctggctacttgtttctgatcttaaaccaaactccgggccttgtagtttctaatcaaatgctggaggagtacctgctgcttcctgagttgccggagtgacttgtctcctacccttttctccctagtagggtcagcaacatatcataagcctattagggttagaaacataccatctaggccttcatttaaacacaaaagcttcgtaaaaatagatttgctaaattatggaaattcttttatttcagtggtcaacagactatcatgagtcaatatcagatgagatgtggttagaacatgtacttcctattccccagtcagctgtgttgtgactctaccatttgctacaggttttcatcacaaatgcattctcttttcgtaataaagtgaccattctgatttctcaatgttgtataaaaatttttgtagaattttctataatattaaagtgtttctttggttatttatgttcttaacatagagctggaacttccagaaatcacctaaaaggtctgtctctgggcaaatacaagtctaaaccatttaaaacagttcattctattttaaggttggggtttccatgcctgtccttgaaaacctgtctagcacgttgcattatgtgagtttcaaaatcatcttttctctaaccatcttaaagtgcctacttttcagctgtttcttacatattatacctacagcacaactgacagaaggtaggtaagttggacttcatcaaaattaagaaccttcgtgcttcaaaggacaccatcaaaaaaacgaaaagacaacccacagaatgggaggaaaaattttgcaaatcatatttatattatatatatatatagagagagagagagagagagaccatccagcatatataaagaactcttaaaatgtgacaatgaaaagtcatctcaatttttaaatgggcagagaatttaaacaggtatttctccaaagaagatggatatacaaatgcccaatacacacatgaaaagatgctcagtcagtagtcatgaaggcagtgcaaatccaccataagataccacctcatttccactaggatgagtgtgatcaaaaagacaatgacaagtcctgagaaggatgtgtagaaattagaatcttcttacattgctggtgagaattagttgtagctgctttggaaaactggtaatttctcaaaatgttaaacataattaatgatatgacccagcaagtccattcatgcaaaaacttgtacgcggggacttcctggtgtccagtggctaggactccagcctcccaatgcatgggccctgggtatcaatcccttgtcagggaactagatcccacatgctgcaactaagagtctgcatgctgaaacaaaggcccagtgtggccaaataaataataaaaaagaaaaaaaaccctgtacatgaatattcacagcagaattattgatagtaaccaaaaagtgggaacaacccaggtgtccatcaactgatgaatatataaacaaaagtggtatatccactcaatagaaaattattcagccataaaaggaatgaagtattgatacatgctataaaatggatgaaacttgaagatggtatgtatggtaagtaaaaaaagctagacataaaaggcctcttgtcatatgattccatt

SEQ ID NO: 63908 - DNA, 730 bp, Bovine  19866881786594
  misc_feature (1)..(1): n is a, c, g, or t
nataacttacacagcagttactgagctcatgaaataccctcaattaagggatcacagcaacacatgggatctgtatacccgcctataataaatcaaatggcaaattgctacaattttttcacctgttattcctaatgtactttgaataaaattggttttcaggcttaagtattttcttcacagatagctaaaattgggtttgtccgaaggaaagcatgaaacaaaaagggtaaatcacaccttgatgtttcccgattgctgaatccaatcttaataaaaggcagaaatagtgctacagagggtcaatggggacagaaacgaaatttagaaagactatgtataatataaaatctataaaatcatatggaatggacttattttaaagggaagtggtccccacaaaacaacaaaaacaacttaagaactaggaaagtaagcaataaagacacagctcctcagactatttaatttacagttcttattcactgtgtagatgaaccactatgaccggttttgattttttttttaatcaaattcattaagtcaggtgatatttttgcatttttttagaggttgaatctcttacttatcaatgtttttcttatttaccttcctttatgtttctgccaaaatttatcaactggagttaaatcgtaagacttcttattttttctctttggtctagcaccagctggagaattctccattcctgaagactcttccaagttaa

SEQ ID NO: 63909 - DNA, 1487 bp, Bovine  19866881814575
  misc_feature (1)..(1): n is a, c, g, or t
natattaaatccctaatttgttaatacctgcaaacttgttaaatgaaaattacatcaaagggttttagaaaaatccataatactctaaaatatacttttcctttcttctctatagactagtttcatttttttttttctaaaagggctgattacaaaccaaaatttaattgagaaagcatatagatggctaatactaattaagagccaatcatcctgaggcctaaaaagctctaaaccttttagaagccgattatacatattactccaaaaagaaaaaaaaagaatccagaaagttgtaaaagatgaatagaactaaacctctgaacaatgataggccaccttgaaagctcagctcttagtgagaggttaatggatggttcagttctccttctaagatctaagatctcattgcagtcctatagacctgtggttttcaaactttccttcttagctaaaccaggttacctaacaaggacctactatgagacctaaaatatagataatgggtaatgaatgagcttgtgtgacaaattttaaaatttcttaccaaagtactgatatttgacaggctaaaggaagatgttaaaaagcagccttatatattactgacaaaataacaaaacatttttaagttaaagctaaagacagggagactggttaggacactaccagagcaagaactaaaactggagagagaaaaaaatgtgagaaaaataagataaaatccaagtaacctgctacaaaagtaaatatagcagtaaattaagatgagaattttggaaatttttcaggtttctagctaagatgactgaatggtgattctattcaaaaaaatgaataataaagggccagaatctggttttacagggtacccatcaaataatcatgtactatctatcaaagtgataacatttattaggtaccgtgataaggtcaaaagctcagaaaagaatggactgggtgtacagatttgggagtcattagtgtttggtgatatttgaagccatgaatttaaatgaagttacccagagaaaaagcacaaataaaaacagaaagcttggggacaaaaacagctaaagtactggaaaagtaagaaaaccacaaagaaaaattaaagcaaagaatatgagaaattagggttaaaaaaaaaacagcaaagagtaatttcatgaaagtaagaaaaaccaagtttcaaaaagaaatgaggagtttatgtcaagtatttccaaaggatcaaatgaacaaaagggtctcataaatatgtttgtgatagaagcttcagggaaattcgaaaatggtaaactagctgagaaatgaacaaggcagactattcacataaactatttttagagaaaggttaagaagagatagactataaagccagacaatgggattaggcatttatgagagaaattctgtgtacctgttttccctagagccatcaaactcttctaaaaaatggcatctactttgggggaaaaaaaacc

SEQ ID NO: 63910 - DNA, 1121 bp, Bovine  19866881087126
  misc_feature (1)..(1): n is a, c, g, or t
ntggttagctgagggaagggaagcttatagacactgcttacagatggctgaaccagcggttattaccaagaggaactctgacctgaaaggaagcaatcttaagatggcagagaaaagcagggtgatcatcctagctcttgcaggtgaagaggtgtttgtttttttaactgcatacatacatcctgaatctacagttcatggtttcctttatatgatgaagttacccactgccttgactgctgttttctattcagctttcttgtttttaacaacccaggagcaacaatgaaggatttcaatttccaaatggtttgggaagatataagtaataacacaaacagctatggttaaccacctatgctttccttattctatttttttttttaaagatgtgaacctaaaggtatgtataggatataaagtaaaactgaggtacctcaataatcttccttcaagaacgattactagtatcttttggcacagtttactaaaactttaaaaggtaaaatgtccacccctaacattttccctttcatttctctctcactctccttttctagaccctcttcactttctgtaagaaagggggactaaaacattgtctgcatgtttctcagaatactgtaatgattttgaaacctcatagtatttatcctccgactgtcactttagtacagaagcaaaactcaatttagaggattataaatacgaacaaaactcagttcttgatctcaaggaactttctagggtagtaataatcctaaaagaaatattaataaaatgataaatacatttacttttctctttacacttaaggaagggttacacatgcaaaacttcatctgatactttaaaatatccttgtaaggaagatgggacaaacactattttcccaacattacagaggagatagagataaaacatgcaacatatttaaagccataaaaataactagataaacttatgttgtgattataactaaataaacatgttatagttatctatgtgttgacctttgaacaacacaagtgtgaaccacacaggtccacttacacacggatttttatcaataaataaataatattgtaccataggaactgcagttggttaaatctgatgat

SEQ ID NO: 63911 - DNA, 1335 bp, Bovine  19866881109450
  misc_feature (1)..(1): n is a, c, g, or t
nttgtgcaattgcaaaatggttaagttattctgagccatagatttaacaatgctctaacatctccaagttcctttggaatgtttatatgctttaaaaaagtgaacttaaattgacttactatatttcactttagaaaaaacaagtgtcacaccattttaaagaaatcatagattatataaatgcaagctgatgcaactgattaggacaccagaaattaattctccaaagctcaggaatcacggccttagaagaaacgaagtgttcttcttactcctacttctaccattctaacttctccccatctcaaactttcagttatttctcagatgaggtcaatgaacagtcatggaaggatttttaactagccaagatgccaaaatccttattgattaatagaaatcaccaggcaatactaaactgagtcaatactgttctgctctggtctgtgctgaggtgataacatgaagacgattaatgaaactgctggacctaccgcctcaggtaactgtggaggaaaaggtttgcatttcacgggcgccagagacagacttatactttgggggtgccatttgtagatcaaggtgatggcaaagcgcccagaaatcttcacggtaatgaacttattcacctaggggcaatagaaaggattgttcattcctgcccagaattctcattctcataattcaggtggaaatcatagacatttacatgatgcacagaaggaaatttcagaccagtattcacaaacagcttcagtctaattccatgaagtcagaagtgaggtgtaggttttggtactgccaattcattggtgcttgatttattgacagaagaaagagaagtggggagaaattatttggaattaatgtaattatgtcttatagagaaagattcgttttcaattgcaaaaatgctgggtcggtttacaagtacttctgagccctaattctaatctgagacacagacgatctcaccgaaaagacgcacttggtaacaactgatgcccttgatgttgagaaaagtactttatgcctgccaagtccttagaagttttatgagccttaatattattgtcaaacttattaaagttggaggtattttataagtgagaatggaaaactaatgacaaatgaacaacttaaagctcaaatgaatatctgcagatttgtagagcaaatttaaaaggcttgctacagatgaagtgtccttattgagtcagctgtattaagcatgcaaggacttgtatttggttacaagttatactcccttgtttcctgaaggctgccagctggagtaatttgaattgaataatctatcccattgcaaccctgagt

SEQ ID NO: 63912 - DNA, 1368 bp, Bovine  19866881265973
  misc_feature (1)..(1): n is a, c, g, or t
nctctgggtatgctttggaagggcggttctagtcttccttttataagaaatgtcttgccttcccttcattgatcgggtccgggcactgccagcacctgctgccacttagacagacttttgaataccagcttcctaaaccattcccgctggctgctaataggctaaccttccttggggcgcgtaagaaaacaggtcagcatacataagcagaaaaaaacgactcaagtttaagagatgggactcgccctctccctccacctccgcaataaaaaaagaaagtgaaacattgtaattgtttaaactgcaaatttgagctgttgtaaatgctggtaactggataattttttgcagttttaattttggaagttaaaaaaataaacacgtcttgaaagagcctcttcatcctctatccctgttccccatttttaagccttaattgtcaagccctgcgaattaggggcttgtaaaattagcatagaaatacgactttcaggccgtgcacttgaattccttattatctcttaagtagctgcctgtggggtaaaagtagaggggtggtaacgttgggcctagaattccacttggagttgtctttaaaaccagctttaggtgtaaacaaggaaaaagaattgactgttccctgtgttcaaattctgaaagccaaccataagttaagcacctatttatagaatatttcataatcactgtgagattcaatactcaattgtcttgaaagaaatgaacagtttgtattcttggaaccctaatctttttatcctgagtttagtgtctcgggacctttgaaaaagacttaatacattttggttcatttagcctctctcccccacactgcagtctttctagcttttttgttatactagcttattatttttgcaatgggtagcagatttttcaatccagcatttatcattgtagactattcatgttgaaatgtaaagacagtctgatattgaacaagtagttcaatacatatattgcagaaagttaaaatgtctgggggctgatttggttgtgcatgccttatttttcattcaaaatattgattgtcccaagttttttagcttaaaaactttttaatgattggtgaatttgcatttagcatcgagggaggaaaggaacaggccgagctgactccatcttgaaaaagaaggaaactccgtcttgcactttcagtgagctttggaccatgtgcctggtagccatggggataacatacctatactgaactggcctcctggactgataaacaccagattccataccaagatttcccctggccaaaaagaatgtgataatcccctatgcagtcaatcacctttgtaatctttatggcacccatggtgtagg

SEQ ID NO: 63913 - DNA, 1155 bp, Bovine  19866880399942
  misc_feature (1)..(1): n is a, c, g, or t
nctggaaggtgttttttaattaactgattgaacccggtctgggaattatcaccacaacaattttggatccaaaataataaaaagctgagcaactgaaaaccaagttcaggaaagatgaaagctcttcatggaagcctcagctcaggacactctcctggcttttctaagggacccaggtgccatctgcagtaaagagaacatggccatctaaggttccccaagaaacagcaggggcggccctttcaaggggcagggaacccatgtgaatgcactcatcaagtccgttggctttttgcagagccccaggaaggaacagccgtgtacaccctgcgttggaatgttctctgagggcgggttcagtgccaatggaatgtggggctggtgccattccacttgattctgtttccctctagtggttgatccaacagacaagtttagagagtctgagattgtatctgactcaggaacaaagctgggaggagcagcactgacccatctcatttctctccttgttaactaatatggtcagaggaccccaaacacaagtatattacttcatgcatgagaaatgcaacatcacctgggggctggaacacaatgcttaataaaagtagtataaccttttttactcttcctttatgctagctctgttctaagtgctttagaggtaataattgtatttaatcctcacaaaataccccatgaagtgagagtcatcatttcccattttacaaaaataagttaacagtggtggtgggctttttcttactttggatccaaaattgttgtgagaattcccaggcctgggttcaatcaactaattaacaaatacgtgttgaatgcttgggcttctcaccaagaccttgcactttgtgatggtgacatcaggcaaaacacagacccatgtgctgaatgcctttaactgagcccccacagcgccaggagctgtgatggctgagtgggggagggatctctggctataagcgagcattctgcatctggaaaccccagaggcccatcggcacctgcctgtgagcacaagggcgtaagagaagcacagaaggacggcagatgcactcaccctcctgggggtcctgaagacacactagtgctaagccctgtctgggaaactggtggttcctgccactagtgatg

SEQ ID NO: 63914 - DNA, 2076 bp, Bovine  19866880430054
  misc_feature (1)..(1): n is a, c, g, or t
ncttgtttttctaggaacagtgtagtgggttgaatcatcatcctatggccaaaatgtatgtcctaagccctggaagttgtgaatgcgattgtattcggaagaaaggcctttacagatgtaattaaggaaagaatcttgagatgcgatcatcctggtttatctggatggtccctaaatctgatggatgacaagtgtccttacaagagacacgtggaagacagagacagagcagaggagacagagggagaggtcagagtgatgctgccacaagccaagggatgcccaagggtggaagacagaagacggaagagataaggaacaaattctcccttagagcctcaggagagagcgcagccctgcccacaaccagattttggacttctgggctccagaaccaccagagaataaattcctcttgttctggaccactcaatttgtggtaatttgtcacagtagctgggcttcccaggtggcaccagtagtaaagaacatgcctgccaatgcaggagacataagagatgcaggttccatcaggttccatccctgagtcaggaagatcccctggaggagggcatggcaaccactccagtattcttgcctggagaatccatggacggaagagcctggtgggctcagttcagggatcccaaagagtcggacccaactgaacgactaacacacacacaatgacattatctacccgcaagaggagatataagtcaaaggaagattcaaccatgtagttatttcctgctttgtcagagactcatgtggcaggaaagaatgagaagtcctgtgtttccatcccagcttttctatttacgcactgtgtgacactggcaggtcattcagcccctttgagagtgctgcctcatctgtgaaattagaataatatctgcatgacaaggcagctgtgacggataggtgaattagtatacttgagttaatgtacattttcagccctataaaaatgtaaagcatctttgtggctgtgaaggtatttgggaggggttggccatggttacttgatcacagtaataaggtaagagagaggtcagtgtactgttattgcatttagagggggaaatagtgtttaaatgaagatactcattatcatagatttatttttgtaagtatgaagatgacctcccgtttgaaagttcaattatatcacctttcatttcaaaatattaggtagcaaatgcatcaacagtaggcatttcttaccaaagtaataataatggccatcatctaatggtttctttagactgagcatagtgataacaaactcttccctttataccatcagactgagccatagccccaaaatgtaagcattcttcccagacactgtagacaacagccctacaccagtaagtattattatgcccactttagagataatgaaactgatcaaaattaaattttaaaaaattccccaagggcatatacctaataagcagagaaatagactttttaacccaagtatatctgaccctaaatcatgtgtctttaactaccaaaatcttgaagagaatggaaaccacactgttttccactgaattggaacagaagtcttgtctctgtgacaagctgaccttgacttaaggtcctgtctttgaaatcggtacatgatgatcagagtagcttagatacaggcacacacacacacaaacacacacacaaacacacactcctcctttatacctggctcctgtcagccatgagtttgttatgaaggagacatgtgttataactgactgataaagggccagaaagcttagctcatattgctgattacctatgtatctttgagtaagtgatttaaaatccaagccctaatatctgctttgagtgaaggtcataatgtttatctaacccacctcatagggagttgtgagagtcaagtggaatggtgcgcataaaagtatgtttagatattaaagaaaggggagggtgttgttaggagtttctcaaccagtaagagattgagagaaggtttggtaagtaatataaaaaaaaggaaccattaatcctctgcaaagtcactccttttatttcccatgccacttccat

SEQ ID NO: 63915 - DNA, 1476 bp, Bovine  19866880509572
  misc_feature (1)..(1): n is a, c, g, or t
nctagatagcactcgggattcctcggagtaccagtaactttcttttccatgccccaaattgcaactttttctacttcttcaataataaattattcttgctcaccaggtatccaaacttaagaaggacccttttcttcacaccacataccttcacaatgcttcttgttagtttctacctttctgttcccatgagggtcatttgatccagtgtattagtcaggtttatttctcttgcaagttacataaattcaattttaagtagcttaaaagcaaaaaccaggaatatattggatcatgtatctgggaagttgatggggacggttggctttgcccatatcaggaatcagatgaatgctcaggacttcatctctcttgccatcttcctgcttaaatttaaaatgaaccgtcatgaccctggcttacaaccacagaggattctgattgcatccctgtgaccctcctgaataagtcgctatttgagcctgggtgctgtccgtggggtcgctaagaatcggatacgactgagcgacttactttcacttttcactttcatgcattggataaggaaatggcaacccactccagttttcttgcctggagaatcccagggatgggggagcctagtgggctgccatctatggggtcgcacagagtcggacacaactgaagtgacttagcagcagcagcagcaatgagctcaaacttgtagcctttgtgtggagagtggaacaatcacagaaggagttcctcaagaaaaagaggaatttcgttaccaggatgagctgaggaagaggtgctaggtagtcaagagcaactgaatatcttcctgcaatagccatcctgtgccaggtgcagtgttgggttctttacctatatgagacaggatatacagggaaacacaagatatatagtatacaagcttataataataagatatggaatcagattgaaaagtgaaagtgacagctgctcagccgtgtccgactctttgcgaccccatgaactatacagtccatggaattctccaggccagaatactggagtgggcagccttgtccttctccaggggatcttcccaatccagggatcaaacccaggtctcccacatttcaggcagattctttaccagctgagccacaagggaagccttcagtccaaatcctacatctttcttttattagctgtgctattttggataagttaatctaagtccaattttcttgtgataaaacagtaatgtaagatactccacggaatagcatttagcttaaaagggaagaaaattctggcacatgctgcaacatggatgagccttaaagacatcataagccagacacaaaatacaaatactgtgtgactccacttatataaagcacctagagtagtcaaattcatagagacaaaaagtagaagggtggttgccaggacctggaaactgagaatggggagtatttttttaatggatatggagcttca

SEQ ID NO: 63916 - DNA, 1337 bp, Bovine  19866880517173
  misc_feature (1)..(1): n is a, c, g, or t
naaatgatttctagttaagagtgtttttatacttttaatttgtaaaaatataactggtctcataagtgacagcttttgatgaattctgagtcccaaatttaacagaactgtagtcagaagtggtatgtgaacattctaaagcaaactttactgaaagaaggaattaagtaaaaattttaatgtcattaaatactatgttctgttgtgagagggaagttctgtataaactttcaaaatctgaattgaaatcttgtggattaccccattttttacacaggagggtgtgtaaatttattttaggcaacttacagtgagtattaattttaccattgttggctagtattttactttcaacctttatagtgtgcaagaaattttgtgaaatagtggaaacataagttgctagtcctcctattgtgtttgtcagaagtaaacctctctagaagtgatttctaatcgttatcgtttaggaaaagctaatacggatgttaataggttcaggcttagtgtctagaaggtacaaaatgaatctttggggaatgaagtatgaaatacaggtagctcatttattacacatgtgccagctttaggagattgctttcctcttctgcacttacctagtatggcttacagaattgaacctcatttgtaatagtaactggcatattcaactggaagttgaagcctgttaaatcagattgcagagtatacctgtcattaagctataacttttttaaccatgttgattgtcgtggtgactaagaacataaattctagagccagagccctgaggtggaattctcattctgccactatttgtatataaccctgggcaagttaccagtattctcttcctcagtttcacatctcctaaaataagatagtagtaactacattattgggtcattgtgaaaattaaatgagttcatacttcatatatgtaaggctcatagaataagtcttttaaaatgtcaactgtaactatttttacaatccccaagtgattggataatgaaagttgctgttaaggcttcacttttatcctgtaaattcagaagtcatttcagaaaacacaaaagtgagtttccttgtgataagttctgaaaacttttcccctcctccttgttttcattgctttcccagagaggttaaactgaattaataagactgagttaaaaaattattgtcagtttttatttttttaaatcaaggaaaacaccatggccttttcacttatttatttacctaagtatttccatgaagtgtttgcattataaacactgtgctattgtgttaatgcatgagaaccaaaaagtgggactggctatctgttctca

SEQ ID NO: 63917 - DNA, 1309 bp, Bovine  19866880587030
  misc_feature (1)..(1): n is a, c, g, or t
ngacgtaagcttcataggaagcctgtagaagaactgcacctttaactccccagcaaggccatgcacacagaaaatgttctataaatatttgttgaatgaatgaatcagcctagagtaggctttctaagcctgggtaaccaataaatctcctgttaatggagtataagcgccccatcctgaggcaatttctttcatgacttctttagaaagagttaaccagtacaaattgctatacttttgagtgaaacctgaaaatttaaaaacatctgatatgaaaagtgaacagtttcttcctcaaggcagtagcaagccccagcaaagagaatcaaagcacaaacacaccttctgtaagctgtcgtttaactatcccggttattttggggctttgtaggtaggcacgcttgcggggtgtgcttctagcttgacttaacttgaaggggcttccttctggggctcccacctgtgtgcctgaagcctccatagtacccaggttgcctctttcgctatctgggagattcagaaaggaaagcagttcaacatcttcccaactgagtcttgattttatattctggtgttcacatagagcaatgcagaaaagaaagtgtctttcagatttaaaatatccttttcactcagcatccagagtcatctttggaaaatataaatgagagaaagtcacatccgtgcttaaaacattcattgcatttcaatttaattccattcaataaggaccttccctggcagtccaatgattaagatgcagtgcttccactgcagggggtgcaggttggggaaccaagatcctacatgcagggtggctctatcacaaaataaaaagaaaagaaataaaaatcttaagataataataaattttaagaattcaaaaaattccatcaatagttactgatcaagcatatgccaggccccattctaaatgctgggaatacatcagtaaataaaacagttaaaaattcctgatttcctgaagcttacagaagagggtaggggaaaacatagaagaaacataattttaaaaatttattatactacattagaggctgacaagtgcaaaggaaaggaattggaataagagggctgttaccattaggtgacatggtcagggcaggcctaactgagaaggtggttggagcaaagacttgaacaaggtgaagggcgtgggctgtgaggttatctgggagaagaagaagaaatgccttcctacagcatgacctcactgggtaacttatcacctcctcttgtgcataatagccctccctctctgctctccaaacaccctggccaccccctt

SEQ ID NO: 63918 - DNA, 2948 bp, Bovine  19866880756860
  misc_feature (1)..(1): n is a, c, g, or t
ntatacactagagtgagaccttgcccggctccactcttagataaaagcttgggacttcactggtggtcctggctaggacactaggcttccaacgcagtgggtgaagtttgatccctggtcagggaactagatcccacatgcttcaactaagagtttgcgtgccacaactgaaaaagatcctgcacagtgcaactaaagttaccacttgtggcaagaaagaaatagcatgccacaagtaaggcatgacacaaccaccatagccaaataaataaatatttttaaaaagaagaaggagaacaaagctttcctttgcttccaaactgaactcagtctccttctattggtatgagtgacacaggacaggaggacccttgttgggacctgactcaaaagggtttgtatcataagcagtttttgagggttgtctatgcgtcagttatgctgggtgcaatggatggaattaggcataatattaaaaagagtgcctcccaactcttacctatatgtcagaattacctataacactttttaaaaaatactgaagtatggggcccacccaacatctgctgattcatcaggagcaatatccttgcgacataatataaacctcccaggtgatcttaatgaagagccaaggttcaaagctgtggtgttaaaaatcctaccatccatgaattttagtctacaacaggtaatattgatgtaaataaatctgttataggacaagtagtaaggatacccagagaaggcaatggcaccccactccagtactcttgcctggaaaatcctgtggacggataagcctggtgggctgcagtccacggggtccctaagagtcagacacgactgagcgatttcaatttcactttcacttttcactttcatgcattggagaaggaaatggcaacccactccagtgttcttgcctggagaatcccagagatgggggagcctggtgggctgctgtctatggggtcgcacagagtcggacacgactgaagcgacttagcagtagcagcagcagtaaggatacctattagacaaaagacaatagtggtagatagcatcaagtccgacgcagaaacaaatgaatagatggaaggataaatgcaatattgtcagaggttagggaaatcacagagatttctctgggtaggttctattacatttggttgacgggaggaataatacactctgctgttgttactgctttttgtgtgtgtgtgaatttcaaattaaaggtttatagtcagaaaaagtgcttctggtttaaaaggcaatgctttaacatcttcagatgtatttgaagttgtattaaaattacataaaaggtatacctacagtgtatacaatttgtattaaaattatatgatttttatattttaaggtagaactgcaaataactaatttctgcaaaagactatatattttgtccatgaaaaaaatgaaaaactagaccaatatgctgtgaacatatatgaacatatattacatccatgtttaagtgaattctaggcagttgtatatcaagtgaaaagaaatcaaaggtttgcagtctggctaatgagaggttctctgaagggcattctgtggaatgcatttctcttggcagttgctctagtggatccaattcagttctaagcagatttctttaatccttagctctaactgggtcagcatcatctgattttaagtattattaaagcggacatatgcacaatgattattgaaatagctgcaacaaccttgcctggaaagttgctttttctttcaaaatgctcaaaagaccctattcacataaattgaaaagtttcaggtaggaccactattattataggggagggaacaaagccaaggtagtcctcacatgataaaaataccaaaaattccattgagtttttttaataggctacttagaaaaaattgcttaattaccttatcatagtctctgttttggtttaggaagatttcattgggtgatttgagaacatctgcttgaggatttttcagaaacgtccaaacaaaacagtcagttttgtgtttattcctcagtagaaaccagttatcaacagctgtgtcagtgatactagttcaatatagatgttaggtgctcttcattacattcggattttattacactccactgttttaccaaaagtcccttattatttgcagtttgtcagtgattctccttgaggttttaggtttacgatcatgtttcatctacagatagtgatcattttatcttgtcatttccaagctttttccctccacattccttctcttgcttaattgtactagccaatatttctagtacaatattaaataatagttaagtaatagtagtgataggtatttttgctatgtttttctatatcaggatgcctctggtattgttcatccacaaagtataatgcatattgatattttaggctgttactccacttcatccctagataaaataatattaataatttttaaattacagaaccatccatgaattcctggagtaaactccagtactgacaaatataagaagcattatacctgataaagtcatggtatcatttctcaagtaagtgaactaaggaagaaagaatttaattccatttgcttttgagatctcaaaatagagaattcatcacaggaaacactcattatccatctctgtattcattgcccaaatgcacaccataagaaacatttccaaatgtctgcccatctttgtaactaagtcttcctagtcataaagccagattaaactagagttcatcacctcctcagacactctcctttacactggcatagtacactagctaccaggactcgtggtagtcagtaggtttataaactcagcgctattattgtctttttccctcagtcagatatctctgcccatttgtaataaatctctttccaaactaggacttccacaatagaaatagcaa

SEQ ID NO: 63919 - DNA, 1592 bp, Bovine  19866880780761
  misc_feature (1)..(1): n is a, c, g, or t
nttctctctatcaagtctggacccatggtccatgttttctcaaactagaatcctgaactttttcaaatcctgtcctttttttgcagcatctcccctaaaacatcccggtttctggtaaattccagccctctgttcatgctcctcttctgaggagtggtttgtagacaggagcccatcagaatgacttaacaattatcacctcatctgaccttcctccatagctccttactgtgaacctctcttccctgggcttccagggcaatggtctctcattttgatttcccaggtcctccccccaggtatatagaacatcctaaaggacattttgcaaaccactgcaggcaccaaagtgcattcttaagttctaagggaaaaaactacagtgtaatggataagagtgcagactctgaagcccagcatctggatttagctcagctctcccccttttgcactgggcaaggcaatcttgctgtccctcagtgtcttcacctgtcaaaaggaatcatacttgtatctttgatggtatgtggcctaaatgatctaatcatgaaaagtgttcatttatctagtatataaatgaagtggtacaggcactaaaaacaatgacattcctaactgggagccctagataatggaatagtgaaattatcatgaacataggttcaaatactgaacaatcaattaggggcatgacctctggcactatttaacctctctcagattattaggttatgggttgaaaggggttaatactatctatattataacacagaactgtttctgagatcaaattggataaacagaatcaaacaataagaacagtgcctagcacagagcaggctcccttgcttttcagatcttgtcaggctatgatcattaatatttaattacagatcaaatttaacatatatgactacatttaaaaaccctgcaagttcgctttagtgatgtacagaattacagtaataaatgaaagcctttccacaaatggatgccaccaatcactacaactaaaattatatacagtgaatgactacagacaaggaaataaaaaaaaatatcatgtgtgctcaatgtgttaatgacaggtgatatgaaaaggcatttgaaaaaattttttctgagttttttgagtctaaaatttttgaatttgaggagtctaagtgattccttacaagtcgtaagatcaatacaatgatctatggttacaaaagatgctaatgaatcatcatactactcaaaacatttctgcgttcttgacatacattaatggcaaaaaaaaaaaaaaatttcagaaagagcacaaaacacacctgtgaactcttaagatgtctttttataaggattactgaaaagaatggcattcatatagacacaaggtacactaaaaggcattcttaatgtctgggaaagatgcactactaaagaactttctccctctgacttctttcaacttcactcacctttggcttttaatcatggtttactggggacagttttaagtcagtaagcatgcattttacatggccactcaccaatgagatatgcatcacatttttctaatgcattttgctttcgctctgattcctcaa

SEQ ID NO: 63920 - DNA, 797 bp, Bovine  19866880824322
  misc_feature (1)..(1): n is a, c, g, or t
ngaaccttgggtagtgtgtacgtgaagccattgttacatcatgttcattttttccaagactgcttctttgaacgtgagcttccaggcttggttcccggagtatgtgtgaagaatctggtaaagatatttgagccctatggcaggccagccgtggaccgtcttaacattaccttctatgaaagtcagattaccgcattcctcggtcacaatggagcagggaaaaccacgactttgtgagtctttgatcattttctgactctcttcttcctctattagcttcagtctattctttctcactccagggcttccctggtgactcaggtaaagaggctgcctgcagtgtgggagacccggtttcaatccctgggttgggaagatctcctgaagaaggaaatggaagcccactccaatattcctgcctggagaatcccatggacagaggagcctggcaggctacagtccatggggtcacaaagagtcagacacaattgagcaacttcacattctttcccacagaagtttagtgagaaaaatgtgttctatatgtgtgtgcaaggaaggtatagtatactgcagttttcaaagcttgctcacatttatcattttattagatcatgaagttggagagagaggtggagtagtaagttcattgcccccttggtgccagggatggggacatccagagagcgaagtgactttccaaggaagccacgttgtagtggttccatggacgcaagaaccggatcgtctcttgtctttgatgctgtgagctggtccccctatccccagcatcccca

SEQ ID NO: 63921 - DNA, 717 bp, Bovine  19866881005785
  misc_feature (1)..(1): n is a, c, g, or t
ncttagtttcagcccatggggttcttcagttgcaacatgtgggatctacttccctgaccagggatcaaatccaggccctccacattgggaggacagactcttagccaccagaccaccaaggaaagtcccaatgataatttcttaacaatgctaatgtaggaaatacgattaacgatgactagtttgcacaccattatctggattggagaaaaacgtgtattattttcttgttagagaggatcctgaaacttttcctttaacttttaggtcagttcaggacataatgtttcctagtcagcatggaaataaaaagattaaggctggggtggggggaactgatctgctggagggcctgagtgagaggtagaagtctcttgctgattaaattctgaaaaacagaagaaggcaaaattatttacaaagtaaccagagaaaaggcagtgtgtgtgtgtgcgtgtgcgtgtgcgcgcgcgtgtgtgtgtgtgtttagcacatctcaaaaatataaaaggtcattttaggttctgcaagtagtgcttactgtgtaaatatttcagtctctacataaatgctggacgcattatcatggtgtttttgtgtccttaaacctttctaaatgatgctgtcctttacctctagccactgcttaatggctagtcttctgtggaccgtgttaaggaaccacggaatttccccaggaagagaatcaggtcaaga

SEQ ID NO: 63922 - DNA, 1857 bp, Bovine  19866881095358
  misc_feature (1)..(1): n is a, c, g, or t
nacacagaccccattccttcccaaagctaacctctctcttgcactagggatccaaaaatgtcctcagggctcttgcaggatgttacttcattgataagcctatttttctgtctcagctgcagaaactcctccgtaagctccttcccctcagcctctagccatatgcaattattttctggcttcatgcatcttgtcctccagcgtgcagattggcactgcccactgccctcattcctcacataaactaaactcccttctgtctgtgttttgctcccttcctctgctgaaacagctggtttcatggccatccaagaagaatctaacaggtttttctccatctatgctattctagcttcttgtcgttctgagtttaccttctcaaaagcaaacattcagtctacaccgggtaggtgatgtgtgctattattggctacactgaagtaggcattctctctctcttctcgttgttccttcttagtcttcttttctttactcacactgttcatgtacattatctccaaggattcttggcatagcttgtttggtttctctcactggtcttcctctgggcagcctcattcaagcctatgatttttttttacaggtcattccttcactactctcctgaagccagaatttccaattgtcttttggaagatctcatgtcattaccttttcattcatttaattatccactcaatgaaaacttattgaatgtctccaaaacatgtctaaaatcatctactctttatccccactcccatctgcattttgttctgtccttactctggataaatgacattttgatcactacacctcaatgaggatcttcaatctccttatctagacatctaatcagccgttgagtcataatggcgataaacattgactcctttaacatatgcctactttttctctagaagttagaagctagcttatttcttgggggcagaagctaatttcaattctctctgcaacctcccaaagtgacttagtatagtttctagaactgagtgtaattccataaatattattgaattacattgaattgaaatcattcattaagtgattgacagttttggcaagaatcttagaagatgtgcctaattctttggcaaaaatgcaaatacactaaattatcaattaatacttgcaattaaggttttaaaattctatagaaatgaacagaaaaaaaaacatgtaatgggcctaaaataataattttgagaatggaaatataattgtttgagagaagactatcctttgattagcaaatgaacttgaataggaaagatgcaatccccaaggataaattgccttgtataagaaaagtatcaagaattgaagagtggcagccaaaagcggggcatccctcgtggctccagtggtaaagaatctgtctgcaatgcagaagctgcggaagacataagtgtgatccctgggttgggaagattccctggaggaggaaatggcaacccagtccagtcctcttgcctggagaatcccatggatggaggagcctggcgggctacagtctttgtgtgttgcaaagagcaggacacgactgaattgacttagtatgatgcaggcacagccaaaagggaagagaaagaggagctaaggaaagtaaagtgagggggtgattttttcagagccccccaccccaaagagagccagtaagtagttaagaatggctaagtgagttttaaacccaatggcatccaataattgattttacataattgaccatgctatactctcattttgtgtaagtcttatcattctctcctctgttgtagaacctcagtaagtctcccatgtggtgccctaagtcagtgagtgtggctgtagagtatg

SEQ ID NO: 63923 - DNA, 1257 bp, Bovine  19866881224704
  misc_feature (1)..(1): n is a, c, g, or t
ngaaggtcccctggagatgagaatggcaaccccactgcagtattcttgcctggagaattcttgccgcagtattcttgccaaagagtcagacacgactgagcagcaaacacttttctatttaatctagcattaaaaaaaaaaaaaaaaaatctggtgtcatatttgagtacttgatgaaaggaggatgaccaaccatcatagtttgtctggaaataaggaatttcccaagacataggctgagttaatcaccctggaaaggaattcttagtccaaatcactcacaagacagaggaagaaactgaggcccagcaaaatgaaagaatcttccctaatatcacataaagaacatttacagtgttgctggcacccagacccagatctcttaagacctagataagggttgcactgacccaccgaccttgtcctggcagtgagatatggggtcagctatgaagaggaacttaagtttaattactggctcttagacatttgactgctttatttatttattgtctttattgaatttgttacaatgtttcttctgttttatgttttggctgtgagtcatgtgggatcttagctccctgaccagggatggaacctgcaccccctgcattggaaggcaaaaatcttaatccctggaccaccaggcaagtcccttgactgctttatttaattcacatgtgaggaaagcaaagcaataatccaagtacattctaatcagtaattgtaggggtgcaaatgttctaaagcaaagtaaaaatgatgaccacttgtatatccacatttacagaagcataattcaggatagctaaacctaagtgtccattgacggatgaatgattaagcaaaatgtggtataagtgtgcgatggagtattactcagcctcaaaaaaggaaggaaattctaacacatcctacaacatagataaaacttgaggacattatactaagtgaaataaatccatagcaaaaagataaatactgtctgattatacctacatgaagtagtctataagtggtttcttacagatctaagatacaaatactcttagagtatgtgaccactctaaggagtcaaaaaccacagagacagaataagaatggcagttgcctgaggcactggggaagggaaatgaagagttagggtttaatgggtagagagttttagctttccgagataaaaattgttttagcgatggatagtgttgatgtctgcacaacaatatggatatacttaaaaccactaactgtaca

SEQ ID NO: 63924 - DNA, 1775 bp, Bovine  19866881424724
  misc_feature (1)..(1): n is a, c, g, or t
naaatgggaattttcacacagaagtctgttcctgaaatgtttctaatttcagtcagtatcacgactttgtgggcttgtttttccctctataatctcaacagatatgctgcctctaaaaagaaaaattttaagacaaatgtgctccttcaaaaatgagtcacatgtatttttgccaacagaagctaaatacttttcacctgtctcacaagctagactgaaatagattcctaaatttctctaaaattagaaaagagctgagtttttccacctaatctgctcctttcatagatgaagacatggagcccaagagacatctaatgtctaacccagttcctgttggccattttggactaaatctggaattgggacatgtatttcctggcaaggaactcactccagtgactaggagaatatttcctcctgctattttattattatacatttaatgcagtatgatggctagtaaagtgatcaaagggattgtgggcaatagatttaaaagtccttcaggaaacagcagtgccagcgggggccggtccctgagcagggcccagtacgcatcacccaccacacagcctgcggtctacagacagcagtgtgggcggagaggcctcggccgactgcagcattaggacaccagcctgctcgcggatgtgcacctgtagccagggcctttagatgcttggcgacgacggtttcctcccgcctctgctttcttctctagctggcttgtgtttctgcttctcttcccctttcagggtgttgtgatgtccttttttttcaggaaatgaatttattttttgtgttggagaatagttgctctacagcgttgtgttagtttctaagtgcagcaaagcaagtcagccacatgtgtgtatatgtatcccctcttccttggatttccttcccgtttagattaccacagagcactgagtagagttccctgtgctgtataatgtgttctcattagttatctattttgtcctttgaaaccaaaggtgaagtttacaaaaagcgcctctgtgagggctaggggtatgggtgttgtgagtgtcagggtgtgtgtgagtgtgagaacatgtgcgtgagtgtttacaccacaatttgtgtaagcctgtccagtagccaggctcacctctggtgttaatccccaaatacttgaatgcccatgaaagtattgacagatttctcaggtaaacaatgtctcagtctgcctgcccatcatatcagcttgaatggacttttactggagattcaccatgactttgacgtgttttggattggagtgaaaagtaccattagtgagctgaaaaaaaaattaacccatttaaaagtcaatcctggttttaatttttttttaaatcacaatttctggcactgtgggctccacctgaggataagtgaaacttctagtacaaaattccctctgtgctcaccaacagctgccaaatcagacctctgggaagcaccccctctccccagaccctgtgggaacttcacagccccacaggtcagaggctggcagagccctcctcagggctggtcctagtaatgtcaacctggccttctgagggaactgtgctttccagctatggtaggaaactctgctcccctcttcttctcttgtttcctgtctttcctgattctcagccttcaccaggagagtaacagtggcttttggtttgtgcaggctgttcaaccagagaagaaagagccttggaaaagacagaaccaataacagaggaaatggaggacccagaatacccagaaggaat

SEQ ID NO: 63925 - DNA, 1677 bp, Bovine  19866881926070
  misc_feature (1)..(1): n is a, c, g, or t
nctatttccttgagcatcttctctgtgtcaatgtgctgtctgacatgaagcccattggtagctgcaataagctcccagacagagatgttccctgggagtctgaggtggagaatttgaacataactaggatatgttccctgactctgataactccagtctgctgatcagctggagatggacatgttaatagctgacacgaatctaactggaacaagatctaagagagatgtgaagagagggccagggaggcacagaggagtgaatgactaaccctacgttgaagcagaagtgacatttgagagctaagtctcaaaaaatgaatgaatagtcactcaatcgatggggaagggaaagctttttggacttctctgccttgtgtttcttcttttggggaaagaccttccccccactttacagtaaccctgctcagtccatgagactcagatgaagctaacgctgcctcccttacccctgggtggtacacagtcccctaaggggctggtgataggtagagtggccaggccaatactgtccaggaggactgtgaatgctatgggaaagccactccctctttccgcagagattttggtataaggatgaccactgagggctgtgagcagctgactcactacccagtggagaggatctggctgagatcagagtcaggccaaggcaaacagcaaggtaagagggggaaggacacagtgtcctaggtcccctgaacttccaggttatgtcaaccaataaattgtctttatttaggcaaaaagcctccaatactttggcagagaaacagccatttgtaaagaatgacaccatgagaagccagggtgtgctttagggtggtggcagggccagtggggcagaactgaagatgtgtgaacgagcagaggctgggaaggcgggctggggcaggtttggaagggacttgtcttcttggagggtgggtcattaagactgtaagtgtgagagtgatattagcagatgtgagtttggaatgtaactctggtgtcatcatggagaagaacctgaaccaacaaagagtggactctggagtccagggagggaggatttaggaaggactggtagagagatgagaaggcctctggggttcagagagcctagaaggtaagaggaggagctgagaaatactaagagatgagaagacaaagctcagtgactgggcatgacagaggcagggcaggagtctgggcagcaggctctacctcctgtctactccacctaatagctaatggggatcttacctaaactctttaagcctcagcttctatatctgtaaagtgggaatgatgacaaccgacacttgatggagctgtcggaggactgaagggactaacgtacgtgaaaacacttagcacggagattggcacaaagttacacaattaatgagaagtgttgtgtggagggcgatttaagggtgaccctaaaacctctaatttaagaatctggaaaaatgcagaggacttgatcagggtaggaaatgctgaaggaggatgcattgtacagggagggtgaacgcaaatttattttgggacatgttgagtctgatgtgcctgtagaacctgggggtgggagtgtctaacaagcagggggacctcataacttgaggttcggtgacactagcagtggacagccgctgaggcaatgcagacaaga

SEQ ID NO: 63926 - DNA, 917 bp, Bovine  19866882005306
  misc_feature (1)..(1): n is a, c, g, or t
ntaaataattttttcagcataaggatgttctatttggactccatttgggacatacttgtaccaaaaattgttcactgtttatctgaaattcagatttaactgggcatccagtatttgtatatgtaaatctggtgagacaggaagggggagaggtggtcattcaccatcattccaaatgcattctagctactcgcccctctcagctgcccacaataggtcctgatggtaccttagcatcatgtgctaagaaggaatggctcatgtcgtaaagtctctctgttaaaatgaggcttgggagtgttttcattttttgtggctgctgtaacaaattaccacaaacttagtggcttaaaacaacacacatttattattttatggttccagagatcacattctgaaagtcaaggtgccagcagggctgtgctccttactgggcagtctagaggaaagttcaatttcttgccttttctagcttctagagactgtctacattcctcagctggtggcctcccttcatcttcacggctagtagtggccggtccagtcttccccgcatcaaattatcctgacattgtttattctgctattctcttccacatttaaaggactcttgtgattacattgggttcacccagataatccaaaatcatctccttattttaaagtcagatgaatagcaaccttaatttcatctgcaatctttaattccgctcgctgtgccgcatagcatattcacagggtctgtgggttaggacatggaatcactggggggccagtattcttctacacagggaggtttccagtgttgcttttcctttctgcagtttgctcgtggagtcccagacctgatgctgaaggacatcgcctgcagtgaggccctcctagagcgtttcctgatctttccccagcgccgtgca

SEQ ID NO: 63927 - DNA, 1385 bp, Bovine  19866882054329
  misc_feature (1)..(1): n is a, c, g, or t
ntgtgtgtgtgtgtgtgtgtgtgtgtttgctcatgcatgcttcaatgaatatcaaataatctgatggctttgtgcaagtagaattaggactggttatattttcagtatgcagaaagatttcttgaaatattttattaactggttgatgtacaaataaaatttggagacaatctagacttaccaagatatatttattgtccccaaactacttaatctttccactcctgagggtttgaattgctttccttctaggagctatatcctggaggaagacctggcaggaattgatggagaagaaaaactctaatcaacttgtctccctccagtagggatctgatactaaaaacaaatcaccagactatcctttccctttcttttccctgtcaccatgtcaggcagctcacacactgcaatatttaccttaatcagggaaggaggagagaatttcagagaaaaaggaagaagaaaattaaaatattaactgtatcattgctacagtggaattgtccttcttcccaggttgggaagtacaatcccttatttttttctcttccattctgaagcaacacacacacacacacacacacactctctctctctcacacacatgtactcagttgcttagtcatgtctgactctttacgacggtatggactgtagcccaccaggctcctctgtccataaaattctccaggcaagaatactggagtgggttgccatgccctcctccaggggatcttcagaatccagggatcgaactgtgccatctgtggctcttgcatttcaggcagattctttacccgtgagccctcggggaagcccctctaccctcaggagacaaaatcaaatgctgaatttgatctacctagtgcctatataaataattggtacttaaaaaaataactattaattgtttaaaatgatagtcaaaattagcattttcttccactttgagcagtaatttagcatgatctgaggaaaaacagggtctgaatagtctcattcagtacagccaaatgttgatgccctaaatccatgacaaatctgcctttcagtttcattgtgacattactccctcccctgcgtatttaactcatctttaagcatgagaagttggcttgctctctggtttcttccgagttggatcttcccagaagggcaacattattttacttaaagtccagtgaattcccagaattctagaaacatccctattcaaatgttagaataaaaacacattccagagtgagatgaaaaactgcagtctgctccaaagcatggaaagttaagagttgactatttgggaaagttcctgctgtgtcaaaaccggatgaaagcaagtctgttttcatttttcgtattcaaaaaggcctcagtaacaataa

SEQ ID NO: 63928 - DNA, 1659 bp, Bovine  19866880364152
  misc_feature (1)..(1): n is a, c, g, or t
ncgggcggcggctcggaccgagggggcaggtctccaagacccacacgtccggtgactctgaaggggcccccgcttgtcacaccgagtgtgctttgtacaacaaaacgagtcactcctcctccccagctacccccaaacctgattctaaatcaagtgacaacttcactgagagaacaggagtccacagtggtgccccggacgcccaaaagcactgaactcctcgcccacaagaatgtctctgctaccagccccagtgtactagtcccctcctgggctgtccgagccacacctgtgggctctcaggggtccccggcccccacatctcccactgtggttcccacacccttgctgactgctcatgacaggcagctgaaggggcctcggctaagctgttgagaggctctgaacccccgagcgcccccaagatggggaggccaggccgtgccagcaattgagttcccttcccgggtctctgcccctctcgcaggcgaatctcaccaagtcccagaatgaatttaagattgttctgaaagagctggaagattctctgctggcccggctgtcggccgcatcggggaactttctgggagacactgccttagtggagaacctggagaccaccaaacatacggccagtgagattgaggagaaagtaagaaaccgtctcagggacccaccccctcgtacccccagccatagcacacagcgggcatggcaggtgggctgatggtcattgagaagagaagtcccagcctcaccggggccccaggacagggtggggggcacggatgcccaccaggcacgtcatcttcatctgctgatggacatttaggtcatttccatgtcttgactgttgtgaatagtgctgttataaacacagcggtgcatgcatgttttcgaattatggtttgtctagttatatgcccaggagtgggattcctggatcatatggtagttctctttcaagttttttgaggaatctccgtactgttctccatcacggctgcaccaacttacatttctaccaacagtgggagcagcaaaggtttccctttgttccacaccctctccaggacttgtaggctaaatttttaatgaaggccattctgtctggtgtgaggtgacacctcattgtggttttgatgtgtatttttttctaacagtcagaaacggtgagcatatttccatgtgcctctaggcgatctgcctgtctttggagaaagtctacttaggtcttccgccctaagtgactttggtttgtgactgcttgtttcaaggtgcaagaggcaaaaatcacagaagttaaaatcaacgaggcgagagagaactaccggccggccgcagcgagggcatccctgctgtacttcatcctgaacgacctcaacaagatcaaccccatctaccagttctcactcaaggtgcggctgcctccaggcccggggctgtggccctcgggtccgggctgcaggtgtccgtgaggggcgggagtcggggcaccaggtctgaccagcaccagcccagggagtgagggtccgagcagtgcccccagaccccgaaccccaacggaaaccaaccagagccagcatgggcggcgtggagcaggctcaggggccgtgcccaagcccctgcctccggtgacacccccaggccttcaacgtg

SEQ ID NO: 63929 - DNA, 2019 bp, Bovine  19866880508856
  misc_feature (1)..(1): n is a, c, g, or t
ngccctgatgccctggcactatgccctgaagcggatcgggggccggttcggctccagcgtcctgtcctacttcctcttcctcaagaccctgctggccttcaacaccctgctgctgctgccgctgctggccttcatcgtgggcgtgcaggccgccttcccacctgcgcccacgggcccggtgcccgccttcacgggcctggagctcctcaccggcggggtgaggcttggcggggagggggcggcgagcaggggcaccctctcgttacacccccaccccaactcctgctgtggctctggctccctcactttccctgggaccctggaagccctagggcagccacgctcctccattcacctccgtgttcccctcaccccgcttgctctctggcccttccccttctgcctttctcctcgctccgccttctgggtgccctgcaagcctgagggtgggtcagctgccaggagggcagactccctgaccctgccaggcgttttctccgcagggctacttcacccacagtgtcatgtactacggctactacagtaacgccacgttgaaccagccttgtgcctccccactggatggcagccagtgcactcccgaggcgagcagcctgccctacagcatgccgctggcctacctcttcactctgggggcagctttctttatcacctgcatcactctggtctacaggtaatggctctctgccgtgtgaacccagttctgagcatcactgacccacccatgcatccatctgttcattcattcatctatttgtctacctatccatccgtcatcactccctccgttcattcatccgttcatctgtccatccattaatccatctggctacccatccattcatcatctcttcatccatccagccacccatccagtcatccatctagctacccacccatccattttcccatccactcatccgtccaaagattgaaggcaagaggagaagggggcaacacaggatgagatggttggatggtagggacatgagtttgagcaaactccgggagatagagaaggactgggaagcttggcttgttgcagtccaccttggggtcacaaagttggacacagctgagtctgaacaacaacaatccatccatcatcactctatccatccatctatctatcaaccatgcatccgtagatccttccttccatccatactttcatccacacacccatccactccacacacatttgctgcgctctgctcagggcaggaagataaatgagctcggtgcacatccttgagacgcttgctgtgtacaggagaagacaggccagtgaagaggctgggaaactgttgcgttgctcaggtgttatggagcatgggagtcagaccagcttcctaggggggtggccctagtaccacagagggaggttaaataagggcagccagggaaagacagaggaaggtactctggttctcagaagaggcagtgcacaggtcctgaggtaagccagaagcttctctagccacgtctgggtgggaggcagccggcgtggtggtggggagtgggagctgaccccatttctagccctttgtgcctgctgggcatcctgctggacaggtctgacctagggtgggcggtggtccaccccaggaggctgagagctctgggctagaggtggggcagggagagtggccggaggcccatcagcactggccgggggcggggggcctcctgtgagtggccggtgcactttgtcagatctgtttctcctggcctcttcgccttttgccaagcctggctctgcttctcccagcatgtcccgctctttcggggagagctaccgagtgggcagcacctcgggggtccacgccatcaccgttttctgttcctgggactacaaagtgacccagagatgggccacccggcttcagcacgacaacatccgaacccagctgaaggtgagctgggggctcacagccccctggggccacggtctgccacccccgtgtccaggggaacaccagttggggccctgcagtg

SEQ ID NO: 63930 - DNA, 713 bp, Bovine  19866880522803
  misc_feature (1)..(1): n is a, c, g, or t
nggcctcgccctctcctgccagcctccctgtggccagcgctctccaggggaagcgactatttcagccagcccagactcgaccttgcaagacacgctctttaagaattcttccagtttgtcatttggaattctcgataaatgcacacccacaccatggcggagctctctggggacagccagcgagtgtccgtggtcaactgctgtccttgatgtcgtccgcgtccctcccctcatccgctggcctctgtgtggccttggaggcctaaccctacctccccgggcgactgagcgctctcctccaaggagagtgcccggataccatgtgatgattttcctgtagaactaatcattagggagaattttttctttttagagtgctttatatcaagagagaattatgttccctatcaaatttcctttgctgtttatgctaccaggaaattaagagctaaattcaatgcttaacagtgagatcaccgcctatggttattagcattttctttttttttttttgggctgagtggcttgtgggatcttagttcccagaacagggattgaacctgggcccacgcagtgaaagtgtccagtgctaaccactggacctccagggaattccatggttattagcatttttgctttttatcttttctaagcattagattttcctattgcattaatcattttattaaaaaattttctttcagacaagtttt

SEQ ID NO: 63931 - DNA, 1415 bp, Bovine  19866880656584
  misc_feature (1)..(1): n is a, c, g, or t
ntacttctctacagcccaggctgtttgggagctgcttctttaactcatggtttcactctccccaataacctagtttacctgtgcaagagtcaaagtttgcctgcaaagatcccttcaaggtccagtaggactggcactattttctcccaatacacataacgctccttcctgacacactctctactctgtgtctccaaaccctctgttctcacctctgctaacacatgaacacactctgtataaaggagctaccatctgagttgtcactgaaggcaggaatgccagcctagtcctcatatgtcccaccaccagaggtaaccacacactgagggcacctctactcagggcatgcatttttttctgattgtacaaccccaaggtgacagtctaggtcatatgcttttctgtccttttatatcttcacacacatatctgaggggtttagaaagtgctgaggaaaagcatctatgcagtgtttgtgagggaccaggagttcagtactaaagatgctgaacaggatttgctcttggttcttatttccagtgatacatacgattttgttcttggttctttctttatccagtttcaaaaattcactgagggttaattcttcaaactgcttcttgacagaaaggaaagcacaaccagatgaatgctttttatgttcttctctagaaaaaacaatacacgagcatgtcaacagagacagtgaagtaaagggagaagagttcattaccaccagtctccctccccacctcagagacacacgctgctctgcttcaggagcagagtatgaattctgaagtggatggaaccagtacccagacccacattcccacatacctcatctcagcatcttcttggtctgtggacaccccccattcccctcctatggctgttatattctatctggagtcctttagcaagcagtaggaaaagcattacagggtgtaaatctaaaggtaccacatgttaaagcccttaaaaatcatccaggaaccgtttgcagttatctcattttattggacttattacataatctattggttcagagaaagggcactactggcctggtttctccagtgaattcttgtgcctatactaccattctctccagtgggaattatccctgcatagcagactgcactagaaccagaacagtctggggacttcctggtggtccagtggttaggactctgcactttcattgctgagggcccaggttcaattcctcattagggaacttaagatcccacaagctacttgatgaagccaaaaagaacaaacaaccacaacaacaacccagaacaatctggaagaaacacacagccacacaaaattccaagaggatagccaatagtaactatataatctgaaaacattacagcacttggaaatccactccccagaataca

SEQ ID NO: 63932 - DNA, 1630 bp, Bovine  19866880786176
  misc_feature (1)..(1): n is a, c, g, or t
nctgcgccgtggtgagagctcggactgtcctggtcccagactgctgtgccctccagtcagcatgacgatccttttgcgttgagaacttcgatttctatttgttttccttcagatcgtttcactgggtagtgatctggtttgggattgactgcaggaggtggtggagggactgctcagaggtgtgcctggccaggagcggggtcccctcgtggtgtgtttgtaggggctggtggtggtcagggccccatggaggctggtatgccgcctgccacctgcctgtgtcgggatggcggtggggcagggcaggcccgtttccaaggtgtcttggaattcctgcattgtttttgtcacacttgtaataggatttctttccttgcaactgtgagagggggaggcaggcacctttgagagcgagggggtgggggaggggtggtccctaggagagaacttaatgcgcttgatctggcttggcgggcatgtcgtgtggtccaacgaggacctccccactcccctgggaatagactcccccgagtggcctttctcccaagctggggctggagagtcagtcacggggcgcgggatccccagcccctgctgctggctgctaggggcccacggttggttgcagggtggacggggagagcgctgggctcccggggaccggaacgcagctctggttcccagaggggcagcggtctcagccttctcctgcgatggtggtctttccatttaaagccgagaatgagtgcagatgaacccctttctgtttctacgagcgtctctgtgttggatcacctgcagcagcggctggtggactctcgggacgcaagcacagcagctgtgcacgtgaaacctgggtgatccttgggttcatggatttatgacctttacgacagagcctctgcaggggaggtgccagctttcctcctgtcataggagcgtagataacacccccgaggccagcccgcagaagtgcaggggctgtgtcacgccttgatcttgtgttcgggagttactgttgcgaagtccttggagcccttgttgatggacgaggaaatggtaactgcctggttcccgggatctgcctcccgtgatctgggaatcttgtcagtgactgagcagggccctggtgccaggaagggcctcaccggggccgaggggaagtggcggcggttgggctctgggcggccagcgggagactctgatctgctcagcagatcatagatgctatggtcaggcttccagcaaacgcccgccgaggttccagcaggggctggccggcctcagggcgctggggtgagaggagcaccagcatctcctgggcctcggcctcactgctgagagctgggtttcccagacatagaggggtcagggtgcgcctggccccagggctctgggcctggggctgattggggggagcaagtctgtgcccagagtcctggtgctagccactctccccccgctccccaagtagggggactgaacccacatcctgaatcttgagaaaagttgggccgcttgtggtcaggagctgcttccccaaatgacatatttgggatattttctttttcttcccaaacctgagtcccaggggcttttgttgggagggtgacagtccgcaccactgcag

SEQ ID NO: 63933 - DNA, 3276 bp, Bovine  19866880857815
  misc_feature (1)..(1): n is a, c, g, or t
ntctagagagtgggctcagaagttgtggcacacgggctcagttgctccacagcatgtggaatcttcccgggccagggatttaagccattggcaggtggattcttacccactgtgccaccaggaaataaggattccagtgtatttgaagggaaaaggagagcagattaaatggacgaggaagggggttggggcagggttataaagttccagggtcgtctggaacggcacctggcccagtgattgagccaggccttgaggcagagagggctgagccacgtaggaaacctggggggcagctggagcaagggccctggggagcaatggccctggaggatgtgctgggcgtgtgttcccagaactgcaggacacctgaggacccagcaggaaggtgggaagcgacggggtgggagttggccttgtaggtcacctgggggccacagggaggtcctgatgggggtcggggggccattgaacagagacggtggtcacctaggaagagatgcagtggtatgcaagggtgccagcggaggtgctgagaagcagttggcttctgggtgcatttggggtatattacatttccacgttatttacattaaacaaaaccccaaagcagaaacagagacctgtgtgtccagtgacgtgggtgccatagaggcgcacgagcctgtgggtgcagcctgaagtggaaagtggggacatgggaggtcccggggagggagggcatcttcactgagctctgcagacagcgtctttccttccgtgctgacatccacacactgctggacacaccacagccaaactaagcagaaccccaagtcaggccctcacagggaagagtggcccgggagcttgtccctagagcccccttgttggggagccttttctggggtccctggggttcacctctcctaacttccacctgttgaaaggggaaaagctggccgcctctgaaagtggatttttttgcagcaaccaaaaaccacttgctactgggcttggcaaatgagtgactaatcaacactggatcatgcaacttttgaccccaaagcagcccccgcttcgaaaagcctgcggctggttttctcaagtggctccgaagtctagttgcaaagcgtctcaggactgagggtacaacctcccaagttaccaggctctgcagcattcagtgcgaagtctcaccccggagttgaggggaaaggtcccctgtgagactgagctgcggtccttacgttcccctcttgtggaacagcagtcagcacacccccgctccccatcagagttgggaagcctgcatgaaatctgtctctaaatcctgatcaaggtcacacctctcctcttctttgttcagtcgctcagtcgcgtccgactctttgcgacccagtggactgcagcacaccaggcttccctgtccttcaccatctcctggagtctgctcatgtccactgagtcggtgatgccatccaaccttctcttgaccatttacctttgtacctaaacaatgtcgatgccccctgagcgcccctggctcctcctccctcaaagcttggggacacggttaaacccactgagaccaagaacacctgcttggccaccttcgaacacctgctcctgtgagcatttcctggcatcacagcatttattcacattaagacttcacttatgaggacttccctggtggtccagtatataatagactctgcactcccaatgtagaaatggctggggtttgatccctggttggggaactaagatcccacgtgctgaaattagagaaacccgtgtgctgcaatgaagagctagtgcagccaaaataaataagtaaaatactttttaaaaaagaattcacttgtcgggggtagagattcatccttgttctttggtctcaccaaaagttgtcaaatttagtaaaataaaccaagagaccgagtgtgtagttaaatgtgaatttcagataaacagctaggataagtgtatgcgatgtgtggaatatacttatgctaatagttattcattattcacctgaaatgcgcaggcgttttctagttgcaactagtttctctagtttctctcgatgcagtggcttctcttgttgcagagcatgggctctggagcacacaggcttcaggagttgtggtgtacaggcttagtcacctcacagcttgtgggatcttagttcccggaccaggaatcgaaccggtgtcccctgcgttggcagaaggattcctaaccactgggccaccagggaaacccctgagcatcttgtcttttatcttgcaaccctaatcccatccaccccatagatttcttgcagggaagctgcatttttatcattctccctttcccggagctgaaatgacttttgctttttgccttttatagcttcacaatggcagcagtaaaaaattcttgtcagcaggatgattgaaaatttacctacaaagggaatcgtttgttacatgtgtgtcagaggcataaaatggattcccagttgcaccactgcagttttgaaatattcccttggtgttggtgctttatagttacctaccccagcacattttatactctccggtatgaggctcctttgcagccagagtggaattatttgttcatgtttgggggcccagaagtaacatttattccccccacaaagtttgatgcaatgggttcttggtattttgcagttattattgtggtaatatttatattcttcagaattatgacaatattcagctactaatgaggttattgtttgtgttttaaagccctggaaataaaatttagtccccacaatacagctgcaattttatgtccccaaagctggccgtaaacgtaataacagaatgcttgtaaaacacataagacatccttctcggaagaagtggtctctctgtgtctcccttgatgggactggcagggtcaggactgggcctaatagttaggatgttcccagtcgttcccaggatggcttcaaagggatgaagtaacttcttcccaggccgcctggagagcaagttacttaacatttcagagcctcaatggcctgtgaaatgggaacaaaaacactgggttattaaatagaaaggttggtcttgagggcatgcgatgggctgtctttggacaatccctgtattggttttctggggctgtcggaacgaactaccgcaaattgcgcagcttttatcagtggaaattgattctccatggttgtggaggccagaagtccgaaatcaaggtgtcagcagggttgtgctccctccgaaggctccaggtagcatc

SEQ ID NO: 63934 - DNA, 1341 bp, Bovine  19866880988129
  misc_feature (1)..(1): n is a, c, g, or t
ncacactctgtgattgctatcatcgtcctttttgctattatttacttataagaatggtaatgcaatgggttctgagagtgctctcatattgtaggggtttgtgtgagaaaagagaaagacaagagagagacagagagacacacacgcacacacagaggatggaatctcttgggggcagtatccataactgtcatcacattcttagatgtgtccatgatctgagaaagaactgctacttaaaatgcaggaaaagtaatccggaaattgaatgataatcataaggagtgttttgcatatgtggtttctttcttttttaatgaaggagagagaaagagtggctttatttccttgccaggcaaagggggaacacaggaggctagcggatcaagaactgcaccccacacatgaggtttctaaccctcacgaccatcctgcagtaataccagcctttctgcttccttcaggtctggcacattctctgcacattgcataacctcagattaaggttaggaacttcggccccaacctcctctggggttaatatttataaatattaatatagccagggcttccatattctacccttaaaatcaggctagcaaaagcctgtctgtggagagaagtaaaataaatccaagtgctaaagctttggggatctgctacactgtaccaacagcccccacaggaatgattctaaacttttctcttaactctcatgtaatgtctgagctacactcctcagccccagcctctctccctgtgattctcctacctctttagacatcctcttccagggagcctcgtgcctgtgatttccaccggagacgtccatccccgctttgtaccaccagacgcacatgtaccacagtgccacatgtaccgcgtgtgcgcgcgacccagcctttttatagcaggtgggcagggctcctaccaggccctgatgaactacgctcacctctctggtgacagaccaggccccatccgggaggagccacgcccacctcccggggacagagcctggtacgcgcgtttctggtccctcccacgagggggcgggctgaggccaaatctccctccaatcccgcggccgcgcggtgattggttccgggatggcggccccggcttccgattggcctgctcgccggggataacatgccctgcgcgggaaccggcgggagcctgcaaggcggcggcagcggcgcagagtgcttggtttgccagctccctgaaggtgccatgagctgcatcaacctgcccaacgtgctgccaggctcccccagcaagacccgggggcagatccaggtgcgggcgccggggaggggtcggggtcagggtcggagt

SEQ ID NO: 63935 - DNA, 523 bp, Bovine  19866881021884
  misc_feature (1)..(1): n is a, c, g, or t
ntctgatctagggatgtgactctcggctgcttttctggatgtggggggctttggaatgttggggggggcctgctcatcccaggggaccaccttcctctggtcgttttgactcagaccttgacattttgcacacttgcctggaggtgagtagggggatcagtttgccacctgcaggggtgtgatgatggacctgctatgacccaggaggacggcagggtccccgtgagctggcaggcagcccatcactccccagtccttccccattctcctaaacgtccggctccgagcgtctagtaaacacactcgggctgggcaggaaagagagcgaggcagggagagaacgcggtgttcagggtctgagaccaaccttgatgccgccccagccctggtgctgcaggaagtccacgggcgacacgaccccggccttgaacgggaaccgcaggaggaagtccagctccactgggttcagctccttcttcatggacaagacctgagaggtggggggctggcttagctgttgtgc

SEQ ID NO: 63936 - DNA, 1461 bp, Bovine  19866881088118
  misc_feature (1)..(1): n is a, c, g, or t
nattgctgctggtgatgaataggctggtcagccagctgtgtacttgtggatggatagaaacgagcccgggattgaagcattctgatagataatcccgtggtaaacaagtgatctgagtaatgtaaacgagttgttttcaaagctgccgggaagtcaagccgattgagggaagtcaggctggttgaagctgtgtggattagtagcacgtgtgagtggttctcggcagagcctgccgggagcccgtggctcccaaggagcgtcagggtcagaagtctgcactaggtctgtggcccctcgatgtaatcgacttttcttctggaaagccaagaatagggtcaccggggccgcgtgtaacctcacgctggcagccccggcccggtgccggacttcttggaggagtgcagcggccgttgggcttctgaagtgacctacgggaattcacactcatttcccttgtgtggggttagggcttgcgttagtcaggaagggccgcctgctgccagggctgcaggaagtctggtcccttggtgtagtttctcgtgtagtttctcgagcctttctcaggaagtgttatgactgttgctcttttctcatcacttcacctctttacgtttaagtgtgtgtgacgggggtggggtgggggtttcttaaaaagcagtttctgaaaataatggcattccagagttctgtttcttttaaaagcttctttctttttcttgtcgtaccgatttgggtgggacccaagccacagcatgtgtaccacgaatcttatcgtacagttcccggagagtttgtggacattcagaccccgaccctgagtgtgggacacttaggtgctcttgcgtgctacaggggacagagcccctctgctgtccatggtggatttgtggttggtgtaggagacagtcctccggtaccccccttttttcttcagagccccacagcccttgttttgcagagcccctaggaggctggcctgcttcctcatgtccacaggtagtgggtggcacctctgcggcccccagggagccccagtgtcctctgcgggtaccctgatggaggtgaggtgcagacccaggcgggattctcgggcgtcagctttccttggcccctccgcggtccctgtgaggacgtgtgagggcttggtcggacctccaggcgcactgccttgcgtcctggtcaaggcgggaggcagtacgtgtgagttctcccctggtcaagcggggaggcagcacgtgtgagctcttcccccggagcgcgtgcagtttcagaatgtttggtggaatggaaaactccggtcttcccacacaaaggagaaatgccttctcccgtttctccgggcttcctttgcacaaaggggtgttgatggcgtctcaaccgctcttctgcccccctctttctcggttctgctggctcctctgagccctgatcctgctgccgtccgtcctgctgccgtccggt

SEQ ID NO: 63937 - DNA, 524 bp, Bovine  19866881178338
  misc_feature (1)..(1): n is a, c, g, or t
nccccacccccacacacaaccactcaagagaaatgtctatcttagaagaatttgtggctattgccccaacatcttttagtaatcaattccaatgttaaacaatgattaatcatgaagtgttttcttgtacagtttaaatatatacaagggaaatgacaaaatggcctaaacatctcgtccttcagagccttttttcaaactttaaaccaaatttcttagtgggttgaggtcaggacatagaagtcatttgacttgactatccactggcgtgaacaggtctttgttaagtaccaattacagaaaagggaggccacctcttctatacaccactcccattaggttcactgatgtaaaatttaaagctgttcagatcggtaagcttccaggagtttcaacctgtgctgattctatcacaaaaacttcctctaaatcaaacttttaactttttgctgaaaatcttccaacgtcacccaatagaagcaagctcctttccatacctagaatcagcacggacggaccacaga

SEQ ID NO: 63938 - DNA, 901 bp, Bovine  19866881423659
  misc_feature (1)..(1): n is a, c, g, or t
nttggggctgggtgggggccgggttgggggcaagctcttggggccccctggaatctagattcccttggttggggcagggccagagacggggggtgtctcaccccaggtcatggagtcgaggctctctctttgaatgggagattcccgagagctccggacggccctgggtaatcggttcatcgattaacagcttgggtgtgggggggtgcttcaacagggggcggggctgctgagttctggggcccagcccagcgaaagtgttgccggtgggaggcggggaaggcggtaattccaggttggggagggtctctgcgcttccgtaagactctgaggatcctcagaggggccccccgggtgccaagcgccagccgggcccccttgggccgctggaagaattggttcccaccagccaacctgttcccatagccagaagttgccatggtgaccccctcccaccttcagctacagcttttccagtaaaaccactgcagaaatccatacttcccgacaggcacgcccccggccccccaccccccactctgcgcggtagggagcggccaggagttaaccctctgcctgccggctggccggaaatattgggggaagtcaggagagtgagagctggccgtgggggacctggggctggaaaggagaaagtgaacagggtagggccagctgctgtttccctcgcggccccaggatgggactccaggaagttagaggagagaaaggaagctagcgccccactgtcaccggctctggagaattcttgctggggtaccaggactgctcccagtggaagccgagtgtccccgctgggctctggccagccgccccagggtgccttccgctgtcggtggggtagcaggactccccagcctggcctgcagttgctgacgga

SEQ ID NO: 63939 - DNA, 1616 bp, Bovine  19866882022376
  misc_feature (1)..(1): n is a, c, g, or t
nagaaaacgttttctaaaaggaaatataactgagctcaacaagacctgaacctgaatatatggacaaattcaggctggtaagtttgtgttaaatacaggaactatactgagtgtttctttctatctcctggttgagttatctgaccctcggggccgttggcctggcctctgagtccccagcggcagctgaaacctccactgccgcctgatgagccccatggacaacatgagacagcggtggggactccgtggactggggtgctgctgaaaactggccttggccacccccaacctcacagcatctctggaagagaaggctcagagctgtgtgcgtgtgagcctcagccaggaggaaatcaaggacagttccagggacgggaaggacatgtgcttgctttcatgtcatttcatcccaggggagagaagtgacatgaggcggccatcgttcaaaaccccaggtcctgcctcacggacgtctgacagtgacttgcaccttctccacgactgtcaaaggcagggaacgaggccaaaatcactctgaaaaccactgagaacctgcaggagctgtcatctctatttctggggaagaagggacagtatggtgttttcctgcagattaataatgcatttaaggtgtccatggtcaggagagacagaacagcaccgcctcgacctgtgaagagacccagcagctgaggactgcctgtagcccgcgtcacttcaggagcagtacattagcaccatgggtgttgaatgcactcacatttcagttacatgcagaaataattttgaagcatttccggtaacatggttaaatttctagaattggattcatttcttgacagcagtacttcacttgaaaggaaatccttgtcatagttcagttccctttacaggttcagtgctattttcatatcaggtattaattaaaaataaagttcatgcctcaaacacactgatttaaaggcacataaaggagaccccggtgagcctctgccagcagccttacctgtctagcagaattcaagttttgcatgcccagccctgaggcaatcccgcccagggcctggctggggagtgcactgttggaaagggggggcttcaggcttggtgaaggcaaaaatggtgaagtcgtgggctcttccacgaggccgccatcctgattggggaaagaaagcgtgagctgtgggcagggcccgtccacacacaaagcacaagttcccaggacgcagacaggagagtggatgaacataaaggagtgaaagatcaaaaacgtgtagacgagaggtggagaaatgggcaaaaggaagaggggaaaagaaaaaagagaaacaggattaagacgctgttttcattttaacaattattttacaaacacgcatgtcagcttacatagtctcatcactaccagccctgcctatggggaggtcaggagagagacagcgtaagtcttagttggaaaacactttaaccaccgttttcaaacaaacaggctcctctgagaacttactaacaaggctctaggtatacactaggttgcgatctgctgatattcatctgttttgatttcatatgacttaacctaataataaggtaaattataaagcagacaaaaa

SEQ ID NO: 63940 - DNA, 3181 bp, Bovine  19866880234045
  misc_feature (1)..(1): n is a, c, g, or t
ntcagttcttcgcatcaggtggccaaagtattggagcttcagcttcagcatcagtccttccaatgaatattcaggactcatttcctttaggattgactgttggatctccttgcagtccaagggactctcaagagtcttctccaacagcacagttccaaagcatcagttcttcctgtgctcagttttcttgtagtccacctctcacagtgcgcttaggaggtgctcaataggtgtttgatgaaagactaagcaaacgcatggacactgcagctggggagatcagaacaggaagggcaaaggcaaggggttcctcataattggaattctgggtccttcagcatgcctgaccacctcccctttcctttttttttttctttttccctattttccagatgtgctttttcttctttcttttcccaacattccaagtaaagggtaccaggcccattgaccccttgcttggtcagtgacagatgggagagcagaggcagctgggtgctgctggagtttatctcagagctgttgaggttggcggagggggtcagctagcaggctgaacccaactggcatcttaaaggcaaaatgctgggcaatgttttgcagcttcagcacaacagaggtcctgctttcggagggagaccgataaacaatggccccacagcttaacaggattgaaatatgatgctattcaaaggggatgtcaaaaggattaatagcccatctcctcctagcttggtgctaaagccacgctcctgcctcgagttaaatcacgcttagcctgtgtgctacattttaaatcttctccattaagtgcagaccatcaccatcgcagcgtggggctggttctccgggaccctctgcacactagtacaatgctccagttgggtctttttaatggggaccaagctgagcacctggatagcaagcacagctcaacacattgagtctacaaatacacatctgtcccctttcttgggacatacttctggacttgggtagaaacactcgagaaaaacaaatgtctcagaaaataaagagacacaaataaagggacaatgatggactccactgaatgccaagtgacaagagctgaatcttgtcacacatcctgcacataaacagacttatgggggaagagggaaagtcaaggtaagggtgatggagcagattgtttaaacaaagacagtctaagctgctgtgccagcggtggtcgggtcctatgttcaggcaggcacaccccatgaacgtgctttgtgtccaagttcgggttaaaatggacacgactaagcaactgacacttcgcttcaggttaaaataacccaagatgctaagttcagcacctatggatttaagagtttcattctctaactaggataccgagtggtgcttctcagcacacagatgggacccagagatgatggctctccgtgtggtctgctgaatgaagagcagtttataatcctgacttttaggctgaggacagtgtggcctccttgcttcctggtggaaggaatgattcactctatccttcccttggtatccctttgtgaggaaaaccgactgcctctctcacatagaaagtggactccccccctttactgaggtgcgagtgacaaaactgtagatatgtaaggtttacaaggtgatgtctgatggcatcagtttgaagggattaccgcaatcgagctaactcacatgtccttcatctcgtatagctatttctttatggtgaagacacttgagataaactgtcctagcaactttcgagtatccagtacagtattatcaactctagtcaccatgctatgcattaggcctccagaacttatttatcttataactgagtttgtacgctttgagcagcatctttccacttcctcctgcccccagtctctggtcaccaccgttctagtctctgtatctgtagattccatccccctgcatatataaacgataccataaggtatttgtcttcctctatctggcttatttcatttagcataatgtcctccagtttcatccatgttgtcagaaatggcaggattcccttctttttcaagattgaacaatattccactgtatatcatattttctttatctgtcaacagacatttagctattttcatatcttggctgttatgaacaatgctgggatgaacttgagggtgcaaatatcttctccagatagtgattttatttcctttggatgtatacccagaagtgggattgctggatcatgctgctgctgctgctgctaattcgcttcagtcgtgtccgactctgtgtgaccccatagacagcagcccaccaggctcccccgtccctgggattctccaggcaagaacactggagtgggttgccatttccttctccaatgcatgaaagtgaaaagtgaaagtgaagtcgctcagtcgtgtctgactctttgcgaccccatggactacagcccaccaggctcctccgtgcgtgggattttccaggcaagagtactggagtggggtgccattgccatctccattgctggatcatacggtacctctatttttaattttttgaggaacccctatactggtttccatagtggctgtaccaattacatttccaccagcagtgtacaagtgttcccttttctccacatccttgccaacaactatcttttgactttgataacagtcatcctaacaggtgtgaggtgatatctcactgagattttgatttgcatttccccaattagtggtgttgagcatcttttcatgttccccttggccatttgtcttctttggaaaaatgtctattcaagtactttgcccaatttttaatagaattatttgatttttattattgagttgtgtgagttctttatatattttgaatatcaaccccttatcagatatacggtttgcaaacattttctcccattcaataggctgccttttcattttgctgattgtttcctttgctgtgtaggaaccttttagtttgatgtggtcccacttatttgtttgagtttttgttgcctgagctttgggtgtcaaatctagacaatccctgccaagactgacatcaagcttataccctgtgttttccttggagttattttatcaggagacggtagggaggtagatagttctcctgtcctatccaagtgccaaaaaagactgaagaaaactgtcctggagag

SEQ ID NO: 63941 - DNA, 1355 bp, Bovine  19866880376973
  misc_feature (1)..(1): n is a, c, g, or t
naccacagtttgaaagcatcaattctttggcacctagccttctttatggtccatctctcacatccatatagactactggaaaaaccatagatggactagacagacctttgtcagcaaagtaatgtctctgctttttaatatgctgtctaggtttgtgatagcttttcttccaaggagtaagcatcttttagtttcgtggctgctgtcaccatccgtattgagcatgggcaggataaatacgacattttctctctctcttcctcttgtctctccaactgactgactttctctcactctcctccactcgggaacaaatttgggggcttctctgaagttatcgtcttgacttggtatggagcctcctgcccccactgctatggaaaatgacagagaacacctggcctgctgctcatactgccagggagtgaggagggattcagggtcagccctgagtgctttgtgttcgtatgggttctgtgggtttgtttgaaaagacgaccttttgttggtggagtaattttagttttagttggcacccgagacaaagcggtctttcaacacacccgcagcctataggtggccaggacttttttcaatgagattgcaggaaatttgccaagtcgtttggggcctgtaaattaggccttgtttaaaaatttagataaagcccaatgtgagagagaaatgctttcataacattaaatgtgaattacactgaaaacccctttcaagttaaatgggaaccgttctctggaagcccagagacatgaaatgcttcaaatgtcaaaagagttttcatttattgtcccaagtgaaacgaaggcattttatgtggtttaatagttcagatgcacatgtaaatggaattcacttggaagaatgccggggctgcttcggaatctattttcacaacctgcctgatttcatctccacagtaaccgtacgaggggtgggtcccagcgtccctgtatcagagataaggagagcctttcccatcaactgcattcttgccaccaacatgtaaagctggaagtattgtcacattttaaatgttcatcttaaaggcagcggtcatggaaccatctggagagatctcacggaaacaccggtgaaaggtgttctcagtgttggtgtctgtttgttgtgggcttcccaaccgggtaaagaatccgcctgcaatgcaggaaaccacaggagtttgattcctgggttgggaagatcccccggaaaaggaaatggcaacccgctccagtatccttgcctgaaaatcccatggacagaggagcctggtcggtcacagtccatggggttgcaaagagtctgacacgactgagggactaagcacagcacgtgtc

SEQ ID NO: 63942 - DNA, 1691 bp, Bovine  19866880396243
  misc_feature (1)..(1): n is a, c, g, or t
ntgagacattgtgcgtcggaaagtgaagacaatgaaactgaatctgccaaacctgtgacatctcctaaaaggtgaaatctttttctcatcttattttttcttccatttatgatccaaacatgatcccttccatggaaaaatctctcttcctcagttgccctgagttgactctgtggttgtgacccacatgccacatcctcagtgatccaagactttgttatttatcaggtaaaaatataaagacaaccaagtaaaacacaagttgcagccaagtatttcaatccccagtacctataaaagctgaaattttgaaaaattcctgttatcaaattgaaatcttgttttcattatgtctgccttccagaagagaggaagggtgtttttaaaggcatcttaggtgacctcctttggttaagattccatgtttccactgcaggggacatgggttccatccctggtcagggaactaagatcctgcatgctgagcagcgtggccaaataaataaaagcagcctagaggtcaggattctgtgaatcagacttgtcttgggggcttgccaatatacagacttgcagatccactgataggtctccacaggggtcctggcattttttttttttaatgtagctttctagtgtttacatttggcactccccctcccctccccactccctgcctctggcttccctctcaagggtccgtgagctaggaagacaggcagaagtaaatgccctccaggcagctagcagagcccctccagagggtggtggccccgctgtcatttgcgttctcagtctcagcctaaatggagtctcaaggtctccagggagcccagcccagcacctgccacaagcactaaattctcccagaaccccagagagaaagcagtcctggcagatagagtccctgcttgcggcttgcctctgggccgtctctgctgacttggtgtctggatgctctctcttcatcctcattgtgggaagtggggcatctgtcttttacaggcatctgcctctccctttcgctctttgtatcctacaatccctggattgtttgaaggctagtttcccctacgacatcctcagcatcctaccctcccctgacaacccacaggagcccaccctgcagacattccctgtagggtctgcaaggaacagcatgcaaagggaggcactgaagttttcagggaaaccccagattgtcttcagagcagactttggaattactttctgtcctggcatcaccacccaccatctttgtccatggtgagggttagatttgctcatcattctcagatgggggcagataagcccaggaagctcctggcattgggctgtgagggcctcctgcaggcccagccatctgatggcgatccccaggccaagtcatctgacttgtcttgtgtctccagtacacacatagaaaaagtttctggaaggaagaatgggaagggagggacatggaaggaaaggagggaggaaccatcagtctctcaagattagtccttatttctgcatcctttctgcaagtatgtgtgagcatgtactatgtgccagacacaattctagatgctagtagtaaagaatctgcctaccaatgcagaagacacaggttcgatccctgggtcaggaagctcccctggagaaggaaacggcaacccgctccagtgttcttgcctgcgaaatcccag

SEQ ID NO: 63943 - DNA, 5217 bp, Bovine  19866880423830
  misc_feature (1)..(1): n is a, c, g, or t
natcacattcattgtttaagcctggtttgggtgttctggtgaagtcttagcttgtgaacacttcaaccaagcttggctctcagaaaagaagcttaatacttgggaaaactcatacagatttaagaaattcaaacatggtcttatttttaatggtctatctgggtctatttctgaagatatacctgattagctaaaccaaccaaccattagtattagcttgctggtttgaagttactatttggtagagtagaaagaggttatattcagagcttatgcagagctgggttcagacttggggctttactttctagctgctcactatgagaaagtgttaaatgtccctgaaacttgagtctagtctcctcatctgtaaaacaggtataggggattaaagatagggcttccctattggctcagatggtaaagaatctgcctgcaatgcaggagacccaggtttgatccctgggtcgggaagataccatggagaagataccccactccaatattcttgcctggagaattccacggacagaggagcctggcaggctacagttggtggggttccaaagagtcgtacatgactgagcagttaacactttcccttttcatcactttcagcagattaaagataaatgccctttgttgttcaatcgctaagttgtgtctgactttgcgaccccgtgaactgcagcacaccaggcctccctgtccttcaccgtctccatgaatctgcccaaactcatgtccattgactcagtgatgccatccaaccatctcatcctctgtcgcccttttctcttcttgcctttaatctttcccagcatcagggtcttttccagtgagtcaggtcttcccatcaggtggccaaattattggagattcaccttcagcaccagcccttccaatgaatattcagggttgatttcctttaggattaactggtttgatctccttgcagtccaatgaactctcaacagtcttctccagccccatagttcgaaagcatcaattcttctgcactcagccttctttatggtccagctctcatatccgtacatgactactgggaaaaccatagctttgactatgtgggcctttgtcatatagaaatggataaatggaaccctgggggtgtgaataacagctcactcgaggcttgtgttgggagggacaggaaatttgtatgtcaaacagtgaatgtggtacccagcacagaggagacatccaggtaagctgagttttctttcatttctctaactagtgtggggtccactttattaccagttgctctctcctgctgggactagcctagttggttgaggaattgggtggcgggggtggggagaggggcatgcagggcatcaccctgacttagggctgattggacccctcattgccctctgtaaatggttaaggccagcctcatcagtcatcacagggcacgtttgctgctggacacaaatcatcattagtccatcttcccctgatgcccaagaaggaaaatttccttagttgatgacttcccttggtcatcactaatggtgaatatgataacacatcgaaggctgaatcttctctagttccctactgccaggtctctgcctgtgctctgaccacaggcaagtaagagtctggcctcctggtcactcagagactccctcaaagatcccaccagggctcccacctggccctattccagagcagggaccaagtgtccagctgtgtgcacccctggccccaggcccacgggggcacactgaggcttcctggtgctctcggagtttgttatatctgtagcactcccccaggagagctccagcccagcaagggcgatggaagacatgagcagtgaggtgggaatggttggacaggcttcaagtatctgggggcctgttctggttaggccttgggctttcagtgtccttctcacactcctaacaatggggcaggggctgatggactgccacctgctaagacacatctcatgtagcaaccaggtcacaaagtagggactctgtaggtcatggggaagttgatcatgtaataaagagaaatgacacaagtgcgtaagggcgtctgtggaggcaaagccaggaatttgcccctgtgggtgctgggtgttatctgaagtggtgacactgcggtcatttggcctctccaagcctcggctgactcacctgaagcatgggttatccagagcccacgcttgccaaggtgtccagggagttaaatgaaagaccatctaagccttggcctcaggtacaaacttctgggtgataatgttcatgagactcttccaaccaccttctgaagtgaatcttgtttcctccactgtggcagagaactggaggctcataaaattcagtgttgatcattccagacctgggcagggttgggtggcacaggaagagcagaacgaatcatgttctgaacatgagagaaatcagaaccatttcagaaaccagggtgatattaaatcaggtgagtctggaaacataccaggcatctgtccccctttctatgcccacaaacctgggcagccagaggcatctttcaagtggatggcaagccagagctctgtgcagtccaccttaggccatcatgtggaaacaataagtctgttatcattggccttgtggtcctgaggttctgggcaaatgttgggggtcccagtgcctcttttcagctgcagggcagcagctgcctgccttgaggctggtgaatccagaatgcacccagcttggagcatctgctcttctaggaagtgcctttgggtgatgcttctcattccaaacccaggcaccttagcagggctgaccttgctgcaggcccagagcctctcaggatgcccacctctgatctttcggccggaacagggggagggggcatacaagaggaagtcaggaggctaaattgatctgtgccctgctgtccttcacttccagcttttaggacctactgtgtaccaccatctgttagttctccactgctgcatataaattgccccaaactgagtggcctaaatacacatctattgtttcatgtttcctgggggtcaggagtccagacacagcttagctgggtcctctgcgaaggaggtggccagactgcattcttacctggaggcttgactgcagaagaatctgcttccgagctcccttgggctgttgtcagaatccacttcccactggctgtgtgagcgaggccctggcatctggctggctggcagctggcagcacccaggtgctggaggctgcctgcacttgcaggccacgtgggcttcctcagcaccactgctgacatcatagagccaggaaggatctctctagtgtggacgagcaagacagaatcatagatggatggactggtagatgtgtgtgtgtacagacagatatagatacagacatagattgatggtagataaatatagagattgatggtagataaatgtagatatgtacacatatagagagataaataaagataggtaggtagagatggatgattgataaatatagataagattagatgcatacatatatattcagacagataaatataaatagatttgtacttgtttagtcactgagtcatgctgactctttgtgaccccatggactgtagcctgccaggctcctctgtccatgggattctccaggcaagaatactggagtgggttgccacttctttctccagggcatcttcccaacccaggattaaacccacatctcctgcactggtggtcagattctttaccactgagccacctgagaagctcagatagatagataataacctgctcataacggtgccatcctgccatctttaccgggttctcgtcactagaaacaagtcacgctcaaggagaggagatggcacctgatgtggcacaagggggttgaggtcaaggggatagtctaagaactgtgactgaaaccagcaccttgagcgttaaattgtatccttctcatttctagatgggaaacaggtttagagagagaacttgcccaagctccaagagtgatcctatggccttgctggcgtttcaggccatgctggcccacttctcaatggacacttcttcaccatcatgaccacacttctctccctgccctggatgagtggtactgattaccagtgtgcaggttttgacaagtggggccagagtgctttctccgtggcagcatccgtcgtgctaataatgtgtcttcagtgtgtatcttgtctctgcacccctaccctgtgcacccaaaaggcaaagactgccttcatcttgtttgtggccacatccctctacctagagaggttcttggcctattgcacgcattctgtgaacagtcattcagtcattcaacaaacacttgtggagctggactgcctactctagaaacaaagatgaccaagaggcaatgctgccttcacaagctcctcaccctctagcagagcagagatgttaaacaaataaactacgagatagtgtggtgtggtatgaagatctcagtgacctcctcaggattgcccacccctacctacatccccagggcctgccacagtgactggcacatggtatgtgcatgctcagtcactcagtcatgtctgactttgcgaccccatggaccgtagtctgccaggctcctctgttcatgggattctccaagcaagaatactggagtgagttgccagttcctcttccaggggaatcttcctgacccagggactgaacccgcatctcctgcatctccttgcattggcagctggtttcttcaccactgagccacctgggaagccccagcacatagtaggtgcccagtaatgtttgttgactgttctagttcccttacccagcatactttgctctcttctcttctgcagaggctagaaaataaaaatcataagagattaactgctcaggaaaatccaaagaaaatttttttaaaaagtacataatgacattctacgctggctttggaagtctctgatgcaatcctcagatcctggcacctcccttttggagcggagctttgcatttcgaaagaggaaaaaaaacaaagactgtaattattaaaattgtgtatataggagaatttagcctttcatttgaggtgtcctaatgacacttcaacaactgctagggaagataatagggtttagagcaattacacagaccgtcaaataccgaacacgagtgattcagattcatgcttggaactggaacga

SEQ ID NO: 63944 - DNA, 977 bp, Bovine  19866880428629
  misc_feature (1)..(1): n is a, c, g, or t
ngatttcctttaggattgatgggtttgatctccttgcagtccagggactctcaagagtcttcttaacatcacagttcaaaaacatcaattctttggcactcagctttctttatggtccaactttcatatccatacatgactactggaaaaaccatagctttgactatatggacctttgtcagtaaagtaatgtctctgctttttaatatgctatctaggtttgtcatagcttttcttccaaggagcaagcgtcttttaatttcatggctgcattttatcttaattatccctttaaggaccacagagtccagtcagccaggcactgacaacttactgtgggcgagagcgggaaacccaacttgatcatctgtgtggttcattcaggcagcttaattcaggcagctgtgcagcccaggacctgggtttgcagctgggagaacaaacccagctgtgctaatggggaccagtgaaacatgttccatccaccatggctgcttccaggctctcagggtacccagacgacgtggtacttggtattggcagaaggctccaagtgcagaagcagtgatttagctaagtaaccctcaaaagcactaaaccccaagaggaaaagtctgggtgtagaggacttaatggattgtacagtgttactccaactgttgttcatggtcgaggagcatcaacatcctgcatgaacttgttagaaagcaaactcaggctctgccccctcctcctgggcctgaatctctggggatggaacttgtatattttcacaagttctccaggtgcacatttaaattttttaaaattatttttattttattttatttttttttaacctgtgcacattaaagtcagaaaatccttggattagggagtgaggttagagaaggcaggcaggtgagaggtagaccacgtgaggcttcagaggccaaagcatgggagtttgggatcatcttacttgtaatggggaagtt

SEQ ID NO: 63945 - DNA, 917 bp, Bovine  19866880669572
  misc_feature (1)..(1): n is a, c, g, or t
nagagtgggacacgattgagcaactaaacaacaagtaggcccctccgtgtgtgtggatgtggaaccctcaggtgtggaggactgactctctagtctctcctcccacagtcctcaggcctccattcttgggatgggctcggaagcagtagaaggaatcagaaccactagggagactaggggcgtttgaggatctgtcttggttttcagttgatgaaaaggtatagccatgtattggctatccattttattctagacagcaagttttctcaagcagggtcatttgaacccagaagtaaatgaaaaagagtgtgagaatgtgaccatgagagcaagtagagaggggcgggggtccacacagactttaatgtgaccaggtcacctggacctggaatttaatcctgcagccaacctgggatgccttgagcaactgaagggaattttcagaagggaggcaggattctcttggagattaactttgggctttggcctggctgagtctcgttaaactttaaataaaaggcctcagggaggggacatatgtagggccatcgccgtgccaaggcctgacatttcttattttgataattgatgtggccatgttgaagcctgtcactgcgggagcgtcatgctgtggctctggtagtggcatggctgtgtgaagagggagaaaaatcaatttccactgtccacggagtgttgtttgatttattactgctggaagaagaaattctttatctcccagtccctcttggagaggactgttttacagtctgctgttcgagagactctataaaagaagttgtatttgtccaaactttggtattttgataaccttccttggcgattcagaggacattgaacactcccaattcttacgaccctcatttgtttttgattaaacaattacaggcattgaa

SEQ ID NO: 63946 - DNA, 1414 bp, Bovine  19866880693018
  misc_feature (1)..(1): n is a, c, g, or t
ncctgcattggcaggtggactccttaccactcagccaccagggaagccctctgacctgtcagcacatgtcagtttcctcaagtgagggaatcgtgagaaggtcttcctcacacggggctttgccattagcatgaaatgagatcattaccataatgccagacattgatttctaaataaacctttgccaatatcactacatgtcaagggttcataaaatgttcattggggagaggccagtgttgagactgagaagatggggtggtgcctcactctatggggcaaaggggccatgtaagaggttggcatcctgaccgagtgctagcttgccttctctctctgtctggctctctctcagcaccctctcctgcttatccagacacaaccctgggatcagaaattccttagctaggcagaccctcaatctgagcggatggtgcctccttcccctgcccagttctctggaaccaacctctctccagctgtctccagctagggtgctgcctccactctgtccagcaatgcctcttttacaaactccatcctttcctgcccccccaccccatgccactgcaacctcaattctcacaaagcattccctcccccatcatttctgctttgttcacacttccctgctccccagaaatattactttatccagcgagtgtgctggttgtaaattgaaatgcaaatagatcaacataaatctgaatgtccatttacattaaatatattatgaatataaaaagctaaggccccatgggtctcaactccattagccctattactcttccacccctgggcaatcagcttcggacccatcaccaagtcagtatccacaaaactcacataggcgctgtcacagacatacacaggttccacctgcacttctaattacagcaggaggcccacagtgaagatggtcctcctccacttccttagcataaggaacaattactgatgtgtcgtcccccttgtaagactttgcacagcactctaggatgggaggaatcaaattaaacccctgtagaggattcagggcatctctatttatgcagctaggcctggcacaaatctaatattctgtaaatatgctaagctctgcgcaatttgtccgcgcaccgcgccttgtacagagacgctcaataaaatatctgttggctggttggctacaaataacaaagcaccatgagagcaactcttatctgctctgggggttcattcctttctaggtcaaggccttcaatatgttaatagcagcctgggttgagtgagtcagcagtgggggccgttaggagggagggattctcaggttggtggcatctaagccgcgcagcctggtccttacgctcaaaccccagcataaacagcaaaggccttcactagccatgtttaaccacagggaggaaagtgcagg

SEQ ID NO: 63947 - DNA, 1099 bp, Bovine  19866880763680
  misc_feature (1)..(1): n is a, c, g, or t
ncaagtaagggttcacattctgagcttcctggtagaccttgagtgtggagggaggtatctttcaacctacttcagggtattaactgcatagccagtcctgatgcccacatgagagagggggaaactgcagcgagaggaggaagccttgctttctgtggagctaaaacatgctcagagcacttgctctgtggcttcccttggagatgtgacccttccaaagggtttgaatcgccccgatgagaagacttgaagatgagcctatattggagacccattccactaaggattagttggttccaactgcccgagcagatagaagtgggggaaactgttgttttagcgagaacattagtgaattgtgctattctcttaaatgtgttcctctgattatgtgcttgagggtctgaattaatccgcagcatagggatgctgaatacattgtgcttttccagtcaggctgactgtgttttatctgaaccaaacatctgaatttcaccctaggcagatttctcttcaggttgtaattattctggaacaaacagagaaaataggaaggagcccctccgtgggaaccacaatgctccctgtatggaaggattcctactgaaaatcttcaaaactgcatccttatgttggtctggataattgccgtctgaagtcctgcttccctgttctgtgtagatgagtcctcgaattttttctaaaaaacaaaaaaggaagaaagaaagaaaaggaatgaaaatagatctcatttttcagattagataccattctatgcaactcttggtgatcacattgttccttggagccaaaccagaacaaaaccctgactctccacacttaacgccttcaaagccatcttcttcatcttccttttgaaaatcaaaatcctttaaggcccagtgcagacatgaaccctgacgtgaccgatgctcagacaggaagataactgggggcaaaaactctgctgattctgatgtaacttcaaaatgctttgattttatggctccagagagacatttttgcacttctacagaaatttctgtagtcaacaagaaggaaatggggagaggggaggaatcaaagtgtctgcaagaaa

SEQ ID NO: 63948 - DNA, 1019 bp, Bovine  19866880857020
  misc_feature (1)..(1): n is a, c, g, or t
ntcattatattgtacactttgatatgatattctatgtccctataatctcagtaaagctgaaaaaagaaattatcaatagaaaaaaggactagggggaaatacggcaaaatattgacagtagatgagctctgggcatggaaatagacgttatttctttccccatcagctttcttgtgtattttaagtgcttcatgctgggaatatgctctttctaatttataatggaaaacattttttaaaggaaatcttatttggagactaagtgagaaacataaaaaagagaaagttcaatagtgacatttagtcagtgtagattcatggatggatatccacaggcttattgaacttgcctgatggtagggaggctgaacttagctggtttcagcaaaccaggcttgctccccacagcacacatcttggacaggactgttgggaagagttacagagtgaccaggatggatgtttccaccttggaattctgagaggttgaaactggaatgcttcggagaagagtaacttacagtccatcatttaacacatggatggagcccacaactcaaagtgtttcatgattgtttacaggagtgagagaataggcgtcaccgtggtaaaagtgggaaaataatagagcttggtaaagtgaagtgcaggccttaggtcatgtcctagtgggtgaattgcaaatggttgatgcttttgaactgtggtgttggagaagacttttgagagtcccttggactgcaaggagatccaatcagtccattgtgaaggagatcagccctggggtttctttggaaggaatgatgctaaagctgaaactccagtactttggccacctcatgcgaagagttgactgattggaaaagactctgggattggagacaggaggagaaggggacgacagaggatgagatggcttggatggcatcactgactcgatggacgtgagtctgggtgaactcccggaagttggtgatggacagggaggccctggcgtgcttcgattcatggggtcgcaa

SEQ ID NO: 63949 - DNA, 996 bp, Bovine  19866880891364
  misc_feature (1)..(1): n is a, c, g, or t
ngctggcgctttcattctgctccaccaggtatgatcagcaacagaagagttcttaagagcacagccagcccttcctgctcaaggctatgctcagagaatagcatctggatctaactctacgacatatcaaatatctctcagaagctcttagggcccctgaaaggtgaaacaccagtagatgtctaggtacgaatatgggtgcagccagggagaaaacatttagattccttggccagctcagatgaccgtccccaccccgtgccctctcatttccacgttagctgaaaacagtacacgggagcgagcgtgtctgtccctggaggaaattacactgtacactgtgtcaacctcccgccctctttcatgtcgattaattgcctgccaaatggagagacttttgaaaaggaggatgataattgaaatttcacataattacattttaaaggaacgcttttagcttcccctgacttcagtcaaaactccatcttgtcaaaataatcttaatctttttttttttttgttaaacaaagattgatgaaatatcactggaaatcttttagctgctaattataagtcaagcctctttggggtttttttttttttttttttttttcgggatgtttctttgacttctcaaagtgattagtttggtcctctgcttttaaactgttcattttccacttgcggggaagagtgaaatttcttcccgggttttaattacaatcggagcgttatcctcggatggtatgaagggaggctgtgtgactgggggggaggggtgctgccctgttaatcaggggtaaatctagtatatggggaaggcttgtaccttgtcattacattaccttgttggtctaattaatggtattaccctctgaactatgggtagaagcttaaagaaattcaacacaggcagaaaacaccctcaaggggaaagcagagaaggcctaataaagtactgctcatcgcacgtggggggctgctgctaatttcttc

SEQ ID NO: 63950 - DNA, 1340 bp, Bovine  19866880934212
  misc_feature (1)..(1): n is a, c, g, or t
nttacaaagtttttattttaaaccaaataaaaactttgtatttgtttacaaagttgttattttgttcttttttcggtattcctggtatttgtatcactgaattcatgggtcttgggtgagcaaaagaagcctctttgctcagtggtaaagaatctgcttcccaatgcaggagacactagtttgatccttgatgcaggatgaccccatgtgctgcggggcagctaaggctgtgtgccacaactctgagccagggctctagagcctgggctccgaagcaagagaagcctctgcaatgaaaagcccatgcaccacaactagattaaattcatgcaaacctggctaatttgtcagtccttccgtgttggagcaaatatgatgaatctgagacgctgaggaccgcctcaacgcgcttctgcctggaagtctgattgctgtgctgttcaggaaaataaccggaatttttgcctaggtgctcctgatcaccagataaaacgtctcaatgtgacaaaggaagctgcctttaaagatgaggctgaacagtcatctcatctttcagcctcaggaaagaaaaacaaatttttttttcatggatttgaaaattgtggatcaacagagattagaacccataactcaagggccagaaacagacagaaatgcatgtaagagtagccagctaggaactagctttgcctgatggacaccaggtcctgaaatgcactgggccctccccaaagctcatctcctttattctccacacgctggggcaggttcagaggaagcacaaagaggtgagtgatttactcaaggttacctgcttcatcagtgaattctggatcggcgtgctggccccgggtgccttttcacatggcctctctggaaaatgcaatttggggattcgctttcactatatgaagctgaacttaccttgacctcaatgtttttctgactgaaaatggggaaagcatacatttatatgtcccaggaaagaatttactgtctatccacaaatcattgtcatagacatcggttcctttctcatctgtctagcccctaagttaccctgggggtctattttggctttgccattgccatctggagaaactggctaatttgtagctatttcgtttgtccttggaggaagcagaagcataagaaaaatggtgaacttttttttggtatcagctgacagacaaattaagaactattggaaacagctggatcttgggagtgctacagttgaatgttgttgtttagtcgctaagtcatgtccaactcctttgcaaccccatggactgtagcccaccaggctcctctgtccatgtgatttcccaggcaagaat

SEQ ID NO: 63951 - DNA, 609 bp, Bovine  19866880945237
  misc_feature (1)..(1): n is a, c, g, or t
naccttggcttcctctctgatgggacacaggtgcctccagcatccccctggctctactggctttatggcctcacattagcctgggtgctcactttctttcccagactaactgcaaggccatgtgaattggtgacctcctactgaacattaaattagagaatatatttttagaggcataatcattgaaattcctcttgcctgtattttattactattattctctcttgcccagcttttctagttctgctgcctcccttggaatgctcatgcccagtctttcacggaggcattcttggagctctcctccagcttctgtgatgggaggagggaactcctctttgaacatgtccctggttcccaccaacccagctgctatgcaccaatgaccacagtttccaccagaaaacacaaggagtggttgccctggcaaccgccaagttgtcacttcaggttggcatcctttgccattggaaaccagagcagccagttgccagaaggggaggcagtgggtgcagagggcagagatggggtgtgggtcccagcaggtggctcccagtgctcatgcctggtcccctctctgcagggggccttctgctcgcccagcccact

SEQ ID NO: 63952 - DNA, 1582 bp, Bovine  19866880976324
  misc_feature (1)..(1): n is a, c, g, or t
nttgtcctagtctgaatgtgcccccattgcccactgcctgacggataaaggaatgtgctttgggctgttttttggtagaaatttgtgccaaatcacctacttgtctcctctgcaagcccgggaattggaattgtagtgtataaactgggactaagttctgcatggagccagcaaagccctgttcacatgaagcccccatgcttggtctctctttgggaccatgctcttctctttaggcaacttccgaagccacagcttgcatggcgttttctaaagcagcagcccccaacctttttggcaccagggaccagttgtgtggaagagtttttccatggaccagggctgggggatggttttgggctgattcaagtggattacatctattgtgcactttatttctattattatgtcagctccacttcagatcctcagacattagatcccagaggttggggacccctgttctaaagtcacacccccgacccagccccccaacaaatgattctcaaaccagagcacgctgatgcaagagaacctttgcctgagcatcatcaagctgtgactggtgtatattctcatgacagctgaagatggagcctgtgatggtgaggtctgtcgggtacaatggggaccgtgggacacagctccaggcaggtgagaggaaagggcctggcttcgtgtgaccagatgagaactttgcatttggaggtgatgagtaggtacctatgaggatatgaggtggttacagttctgcttcatctacagcaagtggggatgggccagaaagcacaggttgcagtaaccatggaggcagtgtccggccttctggagtattgggaaacagtccccatcctgagattgatgccaggccattccactggcttcctggtgtttgtaggtctcttttctggaattctccaagctcacttgatagtggtatcgttcttcctttaaactctgtatttcctttcattcacaaacgtaactccccagctcaccccgtaatgctattgatgagcctagggatttgtttttattattttttagtgttctggcatcatcaactgccactttggatgctttgcaaactctgagattttgttccaaggccccctgttcttttatatttgtttgtttgtcctgtaaattatcaggaaacctagaccatatgtttctgattcattgacgccagagtcatcagtgttttgagtagttgtttgaagtctgtaaaggttttatgtctctggtttgtgttcctctttaattaaatgccttttcctaacggccatagaaaactcctggattcacttaaggaggaagaaaagagaccgagcgagacaactgagagaagtgcccctagctcccaagaacatgattgaagccttgtaagagagaaagcctccccccgaagtctggcagtagccaggatgttgcccagggcccccaggagagtgcctggggggccctgctcgagtctgtaagtgcgagtctgccactgtggggggccacggccccagccaggactcactttcccaggaggaaaacccagaacccacggaggatgaaaggagtgaggaaaagg

SEQ ID NO: 63953 - DNA, 1493 bp, Bovine  19866880999947
  misc_feature (1)..(1): n is a, c, g, or t
nctcataaaactcatgcccacgtgtccaagtacataaattcccaggaagccctgagccacagaaatgatgacaaggactcccctgctctttctcttctccatgctgtctgtcctgtgtcttcccagcccccgccacccgagagtccctaaggaattaccctccctctctgcagatggatgctctgtttattcaaattgtcacgtataaatcctggccaatctaggagatgtatctcttgttcatttacatggtttactttggctgagtgggttttaacatgtgctctggggaaaagggcaaagcatctcagaaggaggcattcaggtctcggcgctctgggtgagaagacgaggagcggggcagagtcaaggacatagagacgagtgatcaggtggtgaaccccaacggctaagttatattcccttctcagcaatgccccacccacttaccgctttgagtagtcctcaaaaccagttatgaaatgaagggatataaagaaagagaaaccaggagggaaacaggggagaggattgtggggcatggggaaacagcccacagctttgagttggggatgtatgtttacagatgtccattatatataggtgtctgtacatatatcgatgggcttcccaggtggttcagtgggtaaaggatggcaggagattcgggttcaagccccggattgggaagatctcctggagaaaggaatggcaacccactgcagtatgcttgcccagctaatgccttggtcagaggagcctggaggtctacagtccgtagggttgcaaagaatcggacatgactgaagcgactgagcatacatacacacataaacaaagtatatacgtacagtacacacacacagttcagcgtggacaccacgcacagttactaatgtgaagactgccattctccttttgacttcctaaagaatttcttatcaaatatcacatattaatgcaaacatatgggatctagaaagatggtaccgatgaacctgtttgcagggcagcaatggagacacagacatagaacagacttgcagatacatttggggaagaagagggtgggacacattgcgagaatagcatggaaacatatccattaccgcatgtgaaataggtagccagtgggaatttgagaggtagggagctcgaaccagtgctctccgacaacctacagaggtgggatagggtgggaggtgggagggaggctcagcagcgaggggacatatgtagacctatggctgattcatgttgatgtatggcagaaaccaacacaatactgtaaaacaattatcctccaatcaaaattaaatttaaaaaaaggtcagaaagttggtcaggggcatcccttctgtgtacatacttaaccaaccaggtcacttctgtgtatttgtcatttgcaaaaagtcctttaataataagaagctgctacatagaaagataaatattaaaaccatacatagtaaccatagactaaaacacataag

SEQ ID NO: 63954 - DNA, 1577 bp, Bovine  19866881140075
  misc_feature (1)..(1): n is a, c, g, or t
nttgtggcataagacaggtcagaacaggacccagtttgtatttgaagccagtgagagcttggggtcgaagggacccctgagtagcccccgagagtggaccctccacgtggtctctctggaatatcagccttcccatctcaggctacccattcctcttccagggccctgtgaacccacatagcctgcagcctccacttgaggaaattaaacactggattggttttttcagcgtaaccaaaagaaataccacagggcctgaccttttgttcacaagcagttatagaagtggcatttgctaacgttccaccttgagcctctgcttctctgctttcctctcctggctcctaaggatacagcctggcttggcagtggctcccccaacctccccccccaaacagggttttctaggtaccctcttatgattgtagcatcaggggtcagcaaaggagtcacccacttcatgaaaagcctgacagggatttctggccttgatctaaaccagacacagtgaagaaacaaagagatctggggaatgcctaaaaattcccagggcatccaaaatgatctaccatcgctgaagtttctgctattagaatcatccaccgtcatttacaaactgtcaaaaggcggcagatctctggacttgaggcatcccaaggctgtgggtctttaccctcctaagcctgaattgccttctctggaaaatggctgtagccagtggtatgctggtaagtgatcaacaaccagctctctccagggtggtggagggggcggctagttgtagcattcatcacactccttgggagctgctcaggggtcccttcaaacccaagctctcactggcttcaaatcagtttccatggagtaaatacttaagctactaacttgacatccccaatggcagagctaggaaggatgcacacagtcagccctgaagagcgcaggaagctggcgcatgaagctggctccagcacacccctgggtaacccagcaccttcctcacagagggtaaggaccacataagaggcagcatatgcaaacacacgctacactgagcagtgtgcaaacggaccaccaggagatcaggaagccaggtcttacagctgctgggaatgggcataagcccagttgcaaacttttctactgtgtgcaaggcatggagcagtgctcacctggctcatggaggttgattcaaaaggcttttatatttttgattcacagattcgctgtgctccccacagtctctcttcaaactcagacttcatggcaagcctcaaagtgggtgctctctaccatccatcacaatctctgaaatgaaccctgcatctgccagctcctccctgccaccactgcccatagggtctggttcccggctactcctctgtcctcatctcctgccacgcacccctgctcattctgtatgagcctgtggtctccttgctctgcctgtgacaggtctagcatttgcctcccccagggcctttgcacatgctctctgcttctctcctcatccccccgcccccaaagctgatctctgctcagatgtcacctttcacaaagccttgtctgaagtagga

SEQ ID NO: 63955 - DNA, 771 bp, Bovine  19866881157825
  misc_feature (1)..(1): n is a, c, g, or t
ncggggtctatttcctttttggagctcccgcccgcattcccacactgctcatccacttgacattcaataatggtagtactaatagcagtgagctctaggtcagacatggcgctgagtgcttgacatatattatttaattttatcttgctaatatcctttgtggggggcactgtcaccccccatcttacaatggagataaatgtgtctcagagaagcaactagccttgtgcaaggtcttgacctcacgcctgtgggaccccagaatctgcgttctttaccttccacattcttggctcccttctcctcccaacttctaagctacatctctccggtgtatttaagtccatcttctcctgttctgagtacaatctggtgtcctctgcagaaattcctgtagatggctgaagatagatcccgaagcatatcttagctgtctctgcttaattaagcaatgccaattcaccccctgccaaagagaagcatcaagtgatgacaagaaaggaaaaaagtctgagttcctattgaattgtaaaatctctgattgagcctgcaacagccagacaacaaacatacgctcatatgctcacatttatcctggaaggatgggcacaatggctcttgtcgttatgagaaataagctaagatttaagaaacaggaaaagtacaggttcctcagagactgagatctatctaagcagggaatatatattctcccctttcaatttatttattttttgaccatgccacacggcttacaggatcttagtttcc

SEQ ID NO: 63956 - DNA, 882 bp, Bovine  19866881174890
  misc_feature (1)..(1): n is a, c, g, or t
ncataaaaagacatcaggttcacacagtagcatgtggactttggagtgtgtgcatacaggaggacctgtttcctgctcctgctagaacctgggcttcttgacagctctcatccacagttctctgtgctccagcaactagaccagcatatggtccaaagcaagccgtcctggttaaggatcttttcatttcacagaacagaaatccactcaaagtagctcaagataaaagtggggctttaaaagcatccaaagtcccatgcggaggaggggctcaggactctcttctttcttctttcctcccacttctcatttttccttttctcctcccacctcctctctgcctcctctgccttctcatctcacccaggtccaaaatggttgctccagttccaatgagatgtgatccaaggatacaggatcttttagctcaggcatcctgctattaactggaactgctttttctatctcttggtttaaaaggaatctgattggtccaagccagtccctcaggtttcatcttccaatcagctaagctggacctgaggagagagtagcagagatgtcggatgggtaaggtgggcccttctggggctaaaagtaaaagaaggaagtatatctgttttaggtgtttgacagtaaatgcatgatgggcgaatcagctcaccaatcacagagtccttcctcctaacaaatagaggaacagaaataaacaactggaaatgagttagtgacatccctgtcctgggaaaggcaggtctcacagtccgtcctgcaagacaactaagttctaccctcagagcaggtgacactggaccctttggaaagactgagctatagctgctccacctttaaaatagaatagaattacctgcctcacagggt

SEQ ID NO: 63957 - DNA, 1645 bp, Bovine  19866881298283
  misc_feature (1)..(1): n is a, c, g, or t
natagcaaaagagtcggacatgactgagcaactaacacacttgcccagtccaagctagagcatcacagagaagaacccctgccaagtttctgacctgagaagcagaggctgtccgcgctgagctaggtaccatcccaagcagtcactcgacggtgagatgagaaaagcctcctttcgattttattatgacattagtaactgttaattagagagttgttggagcagcaatcacttccctgcattctcacagtgctaatttctcttggctttgctagcagcaaagaaaaaaaaaaaggctctgctattgttctgggggaccctttatttaccttactgtactatcaatcctatctattctgagctgcttatcatctcaaaacagttgtggagaagcccttttgttaaaggaagaatgtgtttttcttctttgatgagagaagcccattgggctgccaggctggtcttggcattgggtgctcaggtccaaggggcagggttgaagcagggtctgtctgggtttctggctaaagcttttggttaggacgtgaggcagtttgattcatctgcctcatcattggaggttttaacgatgagattagtctgtgataatgggttagatagcatcaccgactcaatgaacatgaatcggagcaaactccaggagacagtggaggacagaggagccccggcgtgctgcagtccgtggggttgcaaagagtaggacgtgacttagtgactgaacaacaacaacagtgtaccacagcccacgggtggacaggagctcggcttccggccagaccacccccagcagcttgtatgtccgctggtgctggaagtctggactgtggctaccttggggacaggaggggctgggactgcctctgggtgctggtgatatcctactgcttgagttacatcggtgcctctttccatcactggtgctcaagttgttcaagaaaaccaggagcagcaccaggtagagaggacctgggggacatgaaaacaaagcaacaggaaggacagcaggactgggcaccgtggagacagaccacggatgctagtggcctcctacacttccttaggtctgagaacggagtaaggtttcattctgttttgctttggttaaccaagcccagaaatcatctgggttgctatcaaaatctccttgctgcaatggccttttactacccgtgaggacacctgttcatggaggcaaccttggtgccacctgacggtaacccctagccccatctcctgagtccccgtctgagaagcactttccttgccccgccatagcatccttcagcttgctcctccccgctcctcatttcaaatccactaaagcaaagacttccaaggccacacgcctcacatgtgcaaccgctgagtgcgtgtggggcacctgtttgatcagactcagctctgggtactctgtgtgtttccaaaggagggatctctgtctcagaaccacggtgctttcacaatccaggcaggcgggatgcatgctgaacaccagtgcctcctagggtggagactggctctttgctatccctgcatccctggttcctgcccccatggcggccataggaggggctcagcaaaggttcttgaactgtgctcagctgctagagaaaaggggacagag

SEQ ID NO: 63958 - DNA, 914 bp, Bovine  19866881488030
  misc_feature (1)..(1): n is a, c, g, or t
nataaaaaggtctgggcaagttgaaaccaacttgtattagtcagacatccttgaatttcaggtgacagaaaacccaatccaaattatcttaagccaaaaaaaaaagtgcgatagctatggctcaggtaattgaatacaccagtgtagatcactcaggcatggctggatccaggggctcaaaaatgccagggtggacccttcaggaatggctggatccaggggcttaagcagtgtcaccttgcactctcttacgctcccttctccatcattggtcttgatagagctgagtcatggaccaaaccctggattgaaaggtaaacagatggggtcagctctgcctagtctagcccacaaggtggaagagggatgcttctccaaaggcagagctggggacacacatgcagcacaggttcgccactagttaggggaaaggccccaaaggcttccaaccacttgggtccaaatcctggctcctccatctcccagctgctcacctaggacaagactatttttccttgctgtgcttcagtttcctcatctgtaacgtgtgaataataataacaactacttcatgaggctggggcttccctggtggctcacacgataaagaatctacctgcagtgcaggagttcagttcagttcagtcactcagttgtgtccaactctttgcgaccctatgaaccacagcatgccaggcctccctgtccatcaccaactcccggagtccacccaaacctatgtccattgagtcaatgatgccatccagccatctcatcctctgtcgtcctcttctcctcctgccctcaatctttcccagcatcagggtcttttccaatgagtcagctcttcacatgaggggccaaaggagtttcaccttcaacatcagtcctcccaataacacccaggacgatct

SEQ ID NO: 63959 - DNA, 1031 bp, Bovine  19866881488457
  misc_feature (1)..(1): n is a, c, g, or t
naaaaatggggcatattagttgtcacttcactgggctccaggcacagttatgcatgtgaggcatcaggaaaatacttgacatgttgtaagtctttgttgttattatttattgaaaagtttgacaaagcactgaagctagttctcctttagttctacatgacgctacctgccttcatcgaaaagaagactccatggcatcagaacaccacgtgccttgaacacccagcgtcttgtgatgtacccaagaggtgagctctgataactataatgacgtgccaaaggtgagtgtaaagtattagctctggacccaccttcctttagaggatactatgttcttaatgatgcacggtacttcttaatgatacacatcacatacttcgatctgtagagctgagacaacattgggatggaggttctttacgtccccttttcctccagcgcttgctttggtggaagaggagaggttggggaagctgggcaggcggctccccctcccatttctctccatcctcccagcctgactccccatcacagaaggtgcagaggcctcgggggtgctttgcttgcagacctgcctgtagcaggctccatctgagctctcgtgctagggtctcagttcatcagagggtagaggggacaggggcttttcataagtgggacccaaaggtccagcaaggccaagtcaacaaagacactaaaacaaattgagaacccacgatgtcccaccacacagaagccacctgctccaacagttgttcttgccaaactcattaaaactatattcagcatctttcatgtttccagcagcttaggattccaagggagaagcaagcatgtctacagcgcacagccttgagtctgccacctagatctgaggtgcatcaaaccagcaaggatgttacagactcattcaaccacatggggaggaagaaaagattcctttgcctggattccctccagcttcttcatagtcaagatgggcctggaaggggaccttgaggatgggtgacgtgggccagcaggatgctaac

SEQ ID NO: 63960 - DNA, 744 bp, Bovine  19866881807102
  misc_feature (1)..(1): n is a, c, g, or t
nggaagctgctgtgtagcacagggagctcagctcggtgctctgtgatgacctggggggtgggatctggaggctgggagggaggtcaagagggaggggacatatgtacacatatagctgatgcacaatgctgtatggcagaaagtaacacaacattgtaagcaattatatgccaataaaaaaaatcagcacagccttagtgcagagtaaagactcaacaaatagtagctgtcatttctggaagactgaattcttaggaggagcaggcaaggattgctcatctcagtgttccagttctaacacccagatgtgagggcccagcccctgatttctttcttcaaggccactcctctcacttgccccagaatgtgggaagaactccccttgggccctctggcctgcaaggggagcctgcagccccccagcaagatgggaggaaccccacctctcccaggtgctccggagacctctgctccctttgtctctgcgtctgatgctggttcctctcagtcccatcacctctgagaagcagctaggtatgattggcatcctgtgggagggggtcttggggaccagcttggcatgtcagccagtgccctgccgtgttcatttttgttgacatttaattatatttcactttcatcagctgtcaggccagcttcctgacaggtcgctgaattatgcttgaagccagtcagcccctgcagacaccttcttatttgggccttctcggcttacggccctcg

SEQ ID NO: 63961 - DNA, 944 bp, Bovine  19866882043326
  misc_feature (1)..(1): n is a, c, g, or t
nagaccttattttcctttaagttggtcgttcagcctctcactggggagaacaaagcagagatggtggaagctgtgaaaattgtttcttgcttaatgaatgaagttgatgctggaacagaaaaactcattggtaaagggaaggaggcttctgtgcagcttggggcataaatttgtttgtattttttctatgtgtctatgacactcttggtggagaaggcctgtgtgaaagatttgaaataacagagctgagtgtacattcctcaacacaaatttacatctacactagaatctcaaaagtgcacattctttcaaatttagctgcaacactcattgaaatgtgctgatgtctacaaatacgagcttctttttctggtgcacttttatccacttaaaaaatgcagtttctagtgtacatttgccaaaaacatcaattctgataacccaaaccacaatgtagtaacttgactcctaactagccggtgatgtaagccgtgcttcctctctcttccagacttttaaagaaaagcaatgtttcaaagacaggatgaagccaactcaaagtctggactgatcttttactgagaggaagtggtgctgggttctagttcaaagccaggtgctcggctgctgtcttccttgacttgctccacggcagcatggaccgcggttcactgtctcaggcaagaggcttgactaaagacagtgccgtgtttctagggactaagtttcaaaacacaaaagctaatttctcagtgtgacaaagctcccatttcactaaaagacttggccccatttaatccccagttcatcaagcccaactttactttttttctttttttccttcctatttttatcaacagtttccactttggatagagatcatgaatgaaccaaccccaggacagcagggttctgaagggtgtggggacagaaatgtcaggagg

SEQ ID NO: 63962 - DNA, 1621 bp, Bovine  19866880244957
  misc_feature (1)..(1): n is a, c, g, or t
nagatgtaaattccagagcacctgacttgcctcttgagaaacctgtatgcaggtcaggaagcaacagttagaactggacatggaacaacagactggttccaaataggaaaaggagtacgtcaaggctgtatattgtcaccctgcttatttaacttatatgcagagtacatcatgagaaacgctcagctggttgaagcacaagctggaatcaagattgccaggagaaacatcaataacctcagatatgcagatgacactacccttatggcagagtgaagaagaactaaagagcctcttgatgaaagtgaaagtggagagtgaaaaagttggcttaaagctcaacgttcagaaaactaagatcatggcatctggtcccatcacttcatggcaaatggggaaataatgagagactttatttttgggtctccaaaatcactacaggtgatgattgcagccatgaaattaaaagacgcttagtccttgggaggaaagttatgaccaacctagacagaagagtgaaaagcagagatattactctgtcaacaaaggtccatttagtcaaggctattttttccagtagtcatgtgtggatatgaaagttggactataaggaaagctgtgcatagaagaattgatggttttgaactgtggtgttggagaagagtcttgagagtcgcttggactgcaaggagatccaaccagtccatcctaaaggaaatcagtcctgggtgttctttggaaggactgatgttgaagcggaaactccaatattttggccacctgaggcaaaaagctgactcatttgtaaagactctgatgttggaaaagattgaaggcaagggaagaagggaacgacagaggatgagatggttggatggcatccctgactcgatggacatgagtttgagcaagctccaggagttggtgatggacagggaggcctggcgtgctgtggttcatggtgttgcaaagagttggacatgactgaatgactgaactgaaacttaaaatgatgctagtcttaaaagaatccatatccccacaaatgaggcagtttgagaaatgtgaactagaacttgacctaggataaaatttctttcaagcctgtcttcctttaatcttaatacatatactttaggctttttctgagaattaaacatgtaaatgtatataaaatgtcttgcatgttataggcatcagccagtgtctgtttgacgatgataatgcaaaataatggtttctgcaaatgtctcctagaacgaatttgctttttgtcttgtctctttcatttgttatgcacacaagcattaatctttctatgatatcttttcaaaatttgtctcttgaattaaaatgattcctaaatgatttcctgttgtacagatgggatataatattttaatgacctgaatccatagatgggattgggacaaagttttctctgttgggatcatccagaaataggggtaaagattaccttgaaccataataaatgtaactctttcacataaatgctctactaatttttacacagcattcactcatgcacatacaacccaaataacaaaaaagattcaaatgtggcatctggcagacttgtacctagatttatgcttctttt

SEQ ID NO: 63963 - DNA, 2181 bp, Bovine  19866880361620
  misc_feature (1)..(1): n is a, c, g, or t
nctgagtgatgcgtgtgccaccaggaaagaccctgaattagaatgattggccaaagaccacccagaaactaatcccatcaccataaaacctgagactctgagccacgtggcagagcagttctcctgggttcccttaccctactgctgtccacccgggtgccctttcccaatcaaatctcttgctttgtcagcacatgagtctcctcagacaattcatgtctgagtgttagacaagagtccagtttcgggccctgaaaggggtccccgttcctgcaacagaagtaaggaagaaggaaaaaagagagacaagaaaaatgagggagggagaaaggcagagaaagaggttggttcttctaatatggttactttacaggaagttttgcccccatgaaattgaaacttgccaaatagtccttttagttttttggagagtcttagtctgatgcatggcagcaaagtgatctctacagtggtacttgggtcactggcagaaaacaggaaggattattgtctacattgtcatgtattaagatttggctactagttttatcaacacttacaaaaaaaagattcccaaattcttttcttttatgatactgaaatatcataaaagaaatcatttcttttatgatactgaaatacacagaattctttttttcaaagtcatcagctttggtaaaacttgtctcaaattacaaaatgaaattatatatatcccaagagctttcaaagaaataatctatgatcttttattataataaagaattctactttaaaaaaacattcttataaaaaattctaaaatgtaatacatcctttctgttaaaaaaaaaaaaaaaaagtatccaaaacttgagaataagaaaaagaatggctgcatgtcctttcaatgacacatccaaggattatttaattgtatagggaatgttgcactcactatttactattgattatgacccaactttgtaagttgcatactaaattgtatatttttgtccagtagagatgcaaatcacttcttaacagtagacaaggtagccacaaaaattatgttttattgccctataggacattaatcagttttgtctctaataacttatttcagtgacttcagagttccttttcttactgataatgtaaattgatgttcataaaattctcttcttaatcagcataccattctgctggtttaatctttaatgggttaaatatttttgacatgtgttcattttatatttgtgtgaatcatgctctttaaatttttgaaaattatattttggcattctaaaatattttagtcatgggtatatgtgcatgtgtgtgtgtgcatgaaatgattaatgatgtcatttaagtaataccaataaagggagactatgttggtcttaactatatatgtaattatgtgtatatatgtgtacatatatatatatatgttagaaatattagagaaagtctagacaatgtctgaaattcagttgccaaaaaactgctaaatgtaataaattatatagttacatactatttcttattctgggataaaaatatttatagaaatattttggaaagactaaaatatagaatctaacttttgagttggggtctgagaaaattatttcttattctcttttacccttcatatggaatatatgcaacattttaaataaatttttaatttataacttaaatactaagtaatgagatttacataaaagattttataactgtagtcatttacagtgtaaaaatgtgatttcttattatttctagctcttaaaatgttaatgtaatacatagctgtgtaattttacaggacagtttaattctcctgaaaatatggagctcagtgaagagtccaaattaaaaagaaattaatatgttttaaatattaagttatttttctagtcttttgagttctgtaatatcttagcctggtgaaaactttacttaaaagaagttaccaacaaccagttctagttggggatttttcatattatcagaaaataaaaatgtttttaaatggatattccatatttgttttattattttaattaccatcaaatatcacaaaaatcaaaatttcgttggcatggaaactaatagaaccatatccaaaaatacataggtattttctcagctctttctatataggataaaagtcttcattgctctgctcagaat

SEQ ID NO: 63964 - DNA, 2675 bp, Bovine  19866880437441
  misc_feature (1)..(1): n is a, c, g, or t
nccctttctcctcctgccctcactattatcgtatttattttacaaaatataaaactgagatccagagaaatcacctaccaagtacaccaagagagaaacataagaaacttgggctctatcttgcataggaacagagactgtcgcagataattccaacttgtctggcccaagtatctggttggatggaaatgctaacaagaagatgtcaaagcccggataaacatttaggtttgggagtgtgcctgtgtattttaagtgttagatttgggtacttcttttgttagagggagttctaagacatccaggaagagatattaagatggcagttggcttagaggtcagaagagaagtcttgagtgaggatataaatcttggagttattgacttataacttatagagtatctatatatgacatttatatatatatatatatatataggcttccctgattccacatgtaatgtgggagacctgggttcgatccctgtgttgggaagatcccctggagagggaaaggttacccactccagtattctggccttgagaatttcatggactatatagttcatggggtcacaaaaagctggacacgactgagtgactttcacttcacttcacttcatatatgtgtgtgtgtgtgtgtatacacttagatgctcatacacatatacatacaaatattcagataactaatacatagaactagctcagtttctgaattcagaatatcccattttttgatcctaaagtttaaggatctatataagttaggattgagtttagctgcttataacaaaaaaaacagattacaaatattacttaggtaacatgactggaagtagggcttttggggtcagagagatctgttagaaatgtagcctcgttatatagcttcctgctcttccatcctaacagtgacatttgctttcattgcgttgtgttgtattctagacagaaagaagaagaaagttaaaaggaggaagggtagcatctatatcaggaaaataaagcattctattttgtttccactggctcgaatgtgttacaaggtcatccttattttttttttttttttaagagagagacctgggaatcaagttcttatctgaatactgtaacctcaaataaaattgaagttctatgacccagataaccatggcactgtgatcactcacctagagccagatatcttgaagtgtaaagtcaactgggccttaggaagcatcactacaaacaaagttagtggaggtgatggaacttcagccgagctatttcaaatcctaaaagatgatgctgtgaaagtgctgcactcagtatgctagcaaatttggaaaactcagcagtggccacaggactggaaacggtcagttttcattccaatcccaaagaaggacaatgccaaagaatgctcaaactaccgcacaactgcactcatctcacatcctagcaaaataatgctcaaaattctccaagttgtcttcaacagtatgtgaaccgagaactcctaggtgttcaagctggatttagaaaaggcagaggaaccagaggtcaaattgccaacatcccttggaccacaaaaaaagcaaaagagtttcagaaaaacatctacttctgcttcattgactacacgaaagcctttgactgtgtggatcacaacaaactcaggaaaattcttaaagagatgggaataccagatcaccttacctgtctcctgagaaatctgtatgcaggtcaagtagcaacagttagaaccagatgtggaacaatggactgattccaaattgggaaaggagtatgtcaaggctgtatattgtcaccctgcttacttcacttatatgcagagtacatgatgtgaaatgccaggctggatgaagcacaagctggaatcaagattgctggggaaaatatcaagaacttcggatatgcagatgacaccacctttatgacagaaagtgaagaggaactaaagaccctcttgatgagagtaaaagaggagagtgaaagagttggcttaaaactcaacattcaaaaaaacaacaaaaaaagatcatggcatccggtcccaccacttcatggcaaatagatggggaaacaatggaaacagtgacaaactttattttcttgggctccaaaatcaaagcagatagtgactgcagccatgaacttaaacgactcctgctccttggaagaaaagttatgaccaacctagacagcatattaaaaagcagagatattactttgccaacaaaggttgtataatcaaagctttggtttttccagtagtcatatatggatgtgagagttggactataaagaaggctgagcgccaaagtatggatgcttttgaactctggtgttgggcaagacacttaagagtgccttggactgcaaggagattaaaccagtcaatcctgaaggaaatcagtcctgaatattcattggaaggactgatgttgaaactgaagctctaatactttggccacctgatgcgaagaactgactcactgggaaagatcttgattctgggaaagtttcagggcaggagaaaggaacgacagaggatgagatggttgggtagtatcaccaccaactcaatgaatatgagtttgagcaagctccagagatgatgaaggacagggaagcctggcatgctgcagtccgggggtcacaaaga

SEQ ID NO: 63965 - DNA, 3041 bp, Bovine  19866880470752
  misc_feature (1)..(1): n is a, c, g, or t
nattggtacctctttaattgagaggcactttgaaaggttctgcagcagttcagaaacggctggcagtttcttgcatctcatctgtctttacccacaaatgcaacaggagtggagtgacacatggctgaccgagatccacaaggagacctgagcaagcggaacaggactcttgttctgattgctgtttaagagatcattcataccccgttcaacaataattcttttgactataataatcttttctaatccatcttggaaaccagtcctactagattttctttaatttttgtttgtctaaggagttttttccctccaacttgatccacgagatactactctgtgcaaaatgtaattaggctaatttttatatctatttagtattttttctgggataacttgtttgtcacttaatggaatagaaatttaatcatttatttttatctgtagaaaaccaggctaagttagtgatgaagatgtctatgttagaaagcaagagctcaagtaggatcttagtctgtaagaatatttgataatgctacaaatagccagtgctaactttgtattctgggggaaaagattttaatttggaaggacaaatatgaaagttgtgagctcggataaagtcatcttgataattaataggtatgtgtatatccacaggggctcttatatttaaaactgaatagagtgtgtttgtgagacagtgtatgtatacgtgtgaatgtgtgcacattgcaagaaatccaaagagagattacatgaatctgggaaaaatctttgaaaaagagattttggatgcagatcctgtggtatgtatatgttttaggagaacaaatgcagatgatctatgatgttgtgacaacttgagtgggtgttctacttttggctcatctgggtttctgagtgatacatctgccacaagacctatatgaatagatcattgttaaactctagaggaaaaatatgtctccagtaagaggccagttgataatagcccctcaaatgcattactcacattacagtcatccaatgtcacacatggtggataagctagatcgactgactcaacatttattccaccttccttaatgttctttctgtatggcagagactaaggagcttaaaagtacatttttcagacttccttttgagcagaagctccagaagtaatttaagttcaatcaatcaaatgctttcatgagagtcttgaatgcagagcagagtgaagtagagagaggggggcctggaagggtcatgcatttttctccttgcagggcctgctgcttccagcagcagcttcctgatacttggagcagatgtgaggcactgtcttcttgcttcccagtttcctgtctgtagtcaaggtagcggtttattccagttatgcagtgatgatctgggaattgctcctagaggcctagcccagagcacttgtaaactatccagcaattgtgtaaaaacctcattctcagtattaaatttctttgctttgctatagccccaatgtcttctgttgtctacatggaacactaaatgatacacagattcttgataattcttttctcttcttatgactctttccctcttcacattaacttttgaatgtctattttaatcagtgcctatgttaaacaatgtctacataaggcccaaattaacaaacactaataatatatagattcacttcagagacaccgttaattgaaaatcaatcctagaggttttgagaggaagttggtatgagaatagtttctctcttggctttcctggggactgactttcaaacttaacacaacatccaatatgaataatctatttccaagattaattaaggtccctctttagactagtaacacttacctaaaatggtcattttgttggtaagtttattgactttagtatatatgaaagctttgttaaattttataggaacgaatggcttatgaaaacttggttgtcatttctgatcttcttacaaagctctacaggtgttataagaaacaggaggataatcttttggccaaagggaaaagctgcatttggggtttctttttgctgatataatgtgtttttctgatttaagatgtgtcattttaagttgatttatacagagctggcaatgcaaagataaatttgcctttttttcttttagcatttaataaactttatctcccccccacaattttagatttacagaaaatttgtgaagatgggcctaagaattcccatatacctcttactcaatttcccctattattaacactttacataattatagtgtaagaattacaattagcaaaacaatgctaatacattattattaactaatgtttatactttctttcattttcttttatctttgtctgatggtctctttctaatccaggacccatccacaatatcacatttacatgtcattctgtttctttatgctcttatttagacatgacaatttctcagattttccttgtttttaataacaaaaccttgatagttttgagcagtacttgtcaggtattttgtagaatgtcttcatttgaaaattgcctgatgatctaatcttgagtgactgggattttgggtttgggagaaagaccacaaagatgaagagccattttcatcacattgaatcaaggatacattctgtcatacattcttttgacattctgtcaacatcactgttgctgttgaccttgatcacttagctgatgtagtgttaggattctcgactatgaagttactcttcttcctcttttcacactggatgaagggaaatcactatgcacagctcacactaaggagtaaggaattatactcctctacttaaaagtggaatatctacataaattatttggattcttctgcatgggagatttatctcttcttactgttgatttgactgtttatatcagtattttgttgctgttcagttgccaagttttgtccaagtggaggtgatgaaattccaacataactatttaaaatcctaaaagatgatgctcttaaagtgctgcactcaatatatcagcaaatttggataa

SEQ ID NO: 63966 - DNA, 1878 bp, Bovine  19866880552468
  misc_feature (1)..(1): n is a, c, g, or t
nactgttcacttgtgtataagtagtttacacacaactagaagcactttatatgaattaaattaatataaaaatgggagttcaaactattaaatctgtgctgtgcttagtcacttagtcgtgtccaactctttgagacttcatggactgtagcctgccaggctcctctgtccatggggattctccaggcaagaatactggagtgggttgccatgccctcctccaggggatcctcccaacccagggatcgaatccaggtctcccacattgcaggcacattcttctccatctgagccaccactattaaatctactttttcacaagggtagttattttatggttgaaatggacattcaaagggataaaactgacactgaaccacagtataatctggaggctgtaaatgtgttgaccctgggttcaagcccttgttctgccacctatttaaccatgaaaccaagaacaaattgatatgcctctctgtgcctcagttttcatatcagtaatacaggagtaccaatgacagtgagaacacttgctaggcttggcgtacaaattaaatactttgatagatcatgccacttagaatagcacctgacacataataagcactgcataaatgatggtgattaatatcatgattattgcttgattgtcagaggagctgtgaacctaaattataaaggttgggatctttaataagctttctcaaaaggtcccaaacaacctctgggtaggcaaagtaagtaaccaacagaaaaaaaaaatgttttcttccccttagaggtgcaaagtagaagcctgctgagtcaattatgtcaggccagcaccaaaggactgacttgcattcagatagcatagtgaaataatagtaggaacaaaagaagcaggaggggtctgctaaagaaagaaatctcttcatccctctccaccctgaggaagtcttccaccccttcctcacactgcttctcgaaagagatctaatcaatcagagttgagggatctactgagtccatcattatcagtggaggatgaaaaaatggggccatgagcactgggttcctcttgtagcacaaggaaggggctggcccagaacctattttcctgaagtaaaaccatcacttgcattctcttcttcagccccttctttttctgtttattttttaaattttattcttctgaagtatagttgatttacaatctttcaagtgtacagcaaagtgatttatatatatatatatatatacacacacatatatatattctttttcagactcttttccattaacgttcttataaaatattgaatatagtttcctgtgctatacagtagatccttgttggttatctattttacatatagtggtctgaatcaattaatcccaaatttatccctgctgcttttcttctttgataaccacatgcttgttttctatgtctctgactctatttctattttgtaaataggttcatttgtgtcatattttttagactctacatttaatagatatcattatttagctttctctgtctgactttcttcccttagtatgatcatctcttggtccacacacacacacaaacacacacacacactagaatattactcatccataaaaaatgatggaataatgctgactgcagcaacatgcatggatctagagattctttagtcttttctgcagccaaccaaagtgtggtgaagtcctgcttttcagggcttcaggcatagggagaataaaggcccatggactatgtgctgcagcccaggtttctggaacattgcttagactttggtacaggagcccagccaacagtaaagtgataatctgcttccttggacaatcattcctggtttgtatctatctcttccagttggg

SEQ ID NO: 63967 - DNA, 1680 bp, Bovine  19866880610879
  misc_feature (1)..(1): n is a, c, g, or t
naagcctggtgtggaatttgagcacacctttcccaagtgagatccttttttagttttaatttttttatgcttagataccacagagggaggaaggaaggcaattaaatcaatctactcatcttctgacagcagttatcaacctcaggagaaaataagaaaaagccatatcatcatcacctgtagtaagctctgtcccaaaagcctcacctatgcaactccccctgtgactctgatgcttttccactgatgcttttccaaaaagatggcttttccaccactgctctaggatggcagtgaacatctgggcaatttagctcatttataaaactagcaccataaagcaaatcatttaaaatagcactgaaaattcaaggtatagtcttttgcacagatgaaaacttagggccttttaaaataaggcaatatctaccttttaagtgacataaaatgtgtattataattatttaatatttaatgaaggtgaaggccaccagcatgctaggtgttatatatcaccctgcacagacagttgggtatgcgtataggagtctggagtccttcaatcacagcgtcatgcagtgaatgggagaatgcatcataccccaaaagctcagatgaacaacattagtcataactggtttacatacttcatttccaccaaggtttcatctttcttgatacattaacatttacattatactccactgcttatagtgcgatttattgaagattctgactgcctggaaaggaggtaagctttctttgtccaactgtaaatcaccctaaagcaaaccttcttttctttgatatgtgaaatactcatctatctccattgtttttatgagttgttgatgtagagcaatctgttttaaaaggggacagtagctgcactagagatcacatttgtcaaaaaggagagaaaatattttaaggtgaaaaaaaaaaaatctaaaaataaaagaaactaataaactatgtaccagtaactgtgccaaacactttctcgatgatttgcctatccaggatagatttttcaccttagaaacaccatattaaagattatgatcagttttaagtattgaaaattaggattgcaaacagaaatagtactgggagacatggattttacaatgatgcataaatacaccagaaagttctttgtaaatgaaatagagttcccttgaacagttgttcctatgccagtccatgagaaaatttgttttggaggagaaaatagaaacaaaatctcagctccttagttctgattcctaacttctacaagttctaaaaatataaactagtcttcagtaaggatggttgaatttctataatttaaggtacaaatgagaccaacattatcaagctcaggtgcttgtaaattttttgtagtacagcagtttcacatgtactaattgattcacaagacatttctattacttccacagctggggctggatataatcaagaagaagtactgtggcacccagaaataaacaaaagttaatggaacttttgctgagccacaaagagtattttcagtgtttggctatgggttcaatttcacacttgagaactttctggttggccttcttttcctctggtcggtacccctaacacttcaaggaggaatggaaaaaggggaaccacagccgacaggagcagtgtctttcaggaaagaaa

SEQ ID NO: 63968 - DNA, 1379 bp, Bovine  19866880619837
  misc_feature (1)..(1): n is a, c, g, or t
ntgggttttggcagccaagaggaaaaattatccatccctaagcagcttgttgtctgaacgaacccagcaatggggcagccaaaaaaggaactgcatcattgagaacctcatgaattttcaaacaagcagcccttggaatttagaacctctcataagggtccaagccgaatgagcttggcacagaaatcagccgctcggaagggtcgcatggtgactagaggggttttggaaaatgttaactatattcaccctcaggcaaaggggaggcagcgcctgtgcatggttttggatctacataaggtgctgcagtccatggggtcgctgagggtcggacacaactgagcgacttcactttcacttttcactctcatgcattggagaaggaaatggcaacccactccagtgttcttgcctggagaatcccagggacgggggagcctggtgggctgccgcctatggggtcacacagagtcggacacaactgaagtgacttagtgagtgagtgagtgaaggtgtctcccagatattagatacattggttcaaagaaagttttaccttgaataatatagggaaatatcacaatgaggggtgtaaataaatgattgctaacagaagctaacagaaggtggtacaaaccagtggcagaaatattaccaagttcattgtatcttagaagtgaaaaaggcccactctattctaaaattgttttaaaactgaaaggcatttagttgaaagtaaatttttgacaaatgaatgttgctaatataaggatatcaggatggtgttcttataaattctatgagacagtaagtttagttttcctgtgtcctgattcagaacgtaaatcatagtttgatcatctccagaactgatgggttttcattttttttagaacttaaaaaaaaggtttatttatttatttgacttttgactgcaccaggcctttgttgctgtgtaaactttctgtggttgctgtggagggttgctctctgattgcgattcatgggcttctccttgtggaggcttctcctgttgcaaagcacgcacggtagggtcctcaggctttgctagttgggacatacaggcttagttgctttgctgtgtgtggaatcttcctagactagggatccaactagtgtcacctgcattggcaggcagattcttaaccagaggaccaccagagaagtcctgtttttttttgttttgtaaaagaattatcaaccgaaaggaagattttccagagtgtgagttagaagaaagttttggctcaaagtcttaagaaagcaaagtagctttcttatattattagcggatgttgagaatgcagaatacaatgaggactcttaagtgttactagcaggtttcagggtaggtaagt

SEQ ID NO: 63969 - DNA, 870 bp, Bovine  19866880657532
  misc_feature (1)..(1): n is a, c, g, or t
nttggtgttgctttcaggttcatggtaagagtggtttccttaggttggaagtagaattattgtcattttcagaatattggtggccaatggagagaaagactggagtatctgaacttcaggaagttttagaaaaacccaaagaattctcttcctgagtctcaggaagaataatgataactgacttggaaagataaaatggattttttaagataatatattcagtttcataatttgttagataattgatcaagttctggaactgcagtgaattttttttcctattcaattgaatttttatgccattctactaggagaattgagtgcaaaagaaataagaaaggcaactttgaagagtctcatcttcatcataaatttattgcacttacctaaaaagaacttctaactcaaccaaggatttcaaagactttttgcttctcagcgcaaagaaaagagaaaaacttggtatgtaaagtgttttacttattagagaacttattatattagcatttaattagtcttaatgtctaatttctaccctagggtaaaaaaaaaaaggtaaactaagactgtatttaaaagacagtatgtttattactgtcataatcaatacttcttcagcattataaagttcatcagtaaaactatcaatgtttcttcttcacattttatgagtcctttttattctgcttttgaacattaaaatgccaagaaaactgaagttttcactaatgaaattggtctagtagaatcagcaccagatgaagagtttacatacacaatgagggcttcactttcataggaaagtaacatgcagaaaagccccgaaagttgtggagtcactaggatgaacggtgggttcaaattctgaat

SEQ ID NO: 63970 - DNA, 1220 bp, Bovine  19866880734564
  misc_feature (1)..(1): n is a, c, g, or t
ntcaattgattattagaaaacaagaaagctctcaaattcagtataaaagtttcaatctaccaaattggaaaaggagtggtaaattaaattcaaaataaatggaaagaagagaacaaaaatatgggaagaaataaaatagaaagacaataaagaaaatcaataaaatctaaaattcatccttgaaaagattaatacatttaatcaacctcttgccagactgataatagagagagacagagagaggatacacaaattactaatatcaggggtaacaggaggatcatgagtatatataatatgggcattaagaggatagtaagggagtattacatacaactttacatcaatgagctataaaatttagatgaaattttaaaattccataacagaacactatcgaagcttaccaaattaaaaataaatatctgatatgatcttatggtcagcttcaaatcatagccttaccacttaacccttagttctgagactttgagtagttcttaaacactctttgttccatacttcttacatgtaaaataaatatgataatactgacaggagtaccaaagtataatcaagctcataactctagaatttatgccaaagcataaacaaactcacaaccctagagttatgaagagtaaatgacttaatgcatatgaagcattttaaatatcaaacacttggtacacattagctatcagtactattgctattattattcctgatcaaagggcaaacaaatatttggtaattttgtggcactgagggaaaggctattgatagtacaactcaaatcatttttgcaaccatttagttggctagtcggctaactagaaaaatggctttcccccatgttgtttcttaatatgccaagatatcttgcattccttttttattaaatatcattacaagaataatgcattcttttttcagctgctggtaaggagttacttcccattatgttagaagtgtcccagccagcagctcatggtattcttagctgaggagtatattttatgacttctttatggtgttctctgaaaattaacaaggtgactacattaaaatgtttattagtgtgtttatgctttggcactcctgttagacttctatttaatttcaaaaagggataatgattgggaggacggtttcgtacaaacagataatgtgaatggcaaaggaaactaagtattttaataggctgcagatgccctgag

SEQ ID NO: 63971 - DNA, 868 bp, Bovine  19866880799989
  misc_feature (1)..(1): n is a, c, g, or t
naatgactttttttttttaatttcaccaaaatctacttagtaaacaaataatggttaccatatgagaggttctctcattgagatatgtggaagaatggcaggaggcaatgaaataaagcaaacaactcagttttgtttttacttttgtaaataaattagtaatggattttttaaaatttagaatgtacatactacttaggttccatctctcaagatatattattcttcagtgaaataagtctcttaattctttggagagaacataaaagaccaaatgtaatacatacaatttagaagcagagttataatgaaaatgcaaattaattcaaaggtccatagtgagatcattcagccatctggttgctaatgaagttcttaattgttatagcatcagcaccccagtcagaagacaagatggagaaaaaaatctgcggccttttaatatttaatatctgttgtcttataatatttttaaaattttaattaaatttcaagaaatagtttccagctctgaaacattttttaataccatggagcaatgcaaaccttgtaaatacaaaagttagaattttttttgaataattatttcccatgctgtgtaatgaatagaaaacttaaacactatattcataattcagcatacaaaatatgtagcaatagggattctgtaaagaataacattaattcatctaagacatatttattagcatccatactgtgcctgaaactgttccaggtattgggcagatacagtaataaccgaagcagacaagattccctgccttcatggtgtctgcgttctaccccaggagacacacagtaaagtaaataaataaaatacatagtactttaaattagttaaaagtta

SEQ ID NO: 63972 - DNA, 1728 bp, Bovine  19866880926403
  misc_feature (1)..(1): n is a, c, g, or t
nctcctataaatccattactgctgctgctgctactgctaagttgcttcagttgtgtccaactctgtgcaaccccatagatggcagcccaccaggctcccccatccctgggattctccaggcaagaacactggagtgggttgccatttccttctccaatgcatgaaagtgaaaagggaaagtgaagtcgctcattcgtgtccgaccctcatcgaccccatgtactgcagcccaccaggctgctccatccatgggattttccaggcaagattactggagtggggtgccattgccttctccaaaatccattactaggggcatgcaaattagagattttgagggtcagggtacaatcatcaccaaaaactagaagaagataagccataagaaagtaagacaaaaaaatccaaatatttaaattgcaaatttgacaggatacaggacacttatatgacagcctaagaaaaactgtcatgggatagagtaagaatttattataactgaactaggccaaatgcaaacatattcttgtcttaaaaaattaaaaagactaactcaaataacaatgaaggaagacaaatatgcacacaggaaagacatacaactcagccatgttggtattcctgctttgtaaaagctgttaaggcacagatttaacaagctaaggtgaattggggctctaaattcacatatatcctagatttttagtataatagctgtctaaatgttaagtatcatttaaagatgcaaaatgaaagaaaaaaaatcctagagggcaacgatctgttcacttctttagcatggtttaaaaagaaaagaattcaatttaaaaatataaattcacagggattaatgaattgcatgtccattgtttgaaaaaaaaaaaaacagcattcaaaattgatctgcaggttgaggatatgagtgagatgaaaacaaacatttatttttccctccaaattttaaactttttattttgtactggggtacagctgattaacaatgtggtaatttctggtcaacagtgaagggactcagtcacacatatatgaaaacaaacatttcttgatcttgagtacttacttttagataagcattatgaaccccattttaaggtttagaaaattaagactcagatgttcaaaaagaaagagagaaacttgcttgaaatcatatggttgtataagctagttacactgatagctagatcagtatagttttttctactacacacttttttccttaatggcttacaggtcaatctggttgaagttcgggttactgatggaggtcagatccttacagaaatgcaagatcccaactcagcagtgtaaaaataggggattttttcccctatggtcactaataacacatcctggctggcatataccagtggataaggaagataatataaaattgacagcaagtggtataatcatttgtggttactttggggagcaaatgctatatttatttcaatggttgttgaaaattcttcaaaatcccagcattcagctcacacttgacttccaaggagaataaaaattcttttcagctgaagggaatgtagtgtgtttcctcttcttcctccagttttatattccacatgctgggcctgtttatcccaaatgtgtgtgtgtgtgtgtgtgtgtgtgtgtgtgtgtgtgttgaggtgggtggtgaggagtacagaaggggggattctgcctgttggaaagtggtggtgaatt

SEQ ID NO: 63973 - DNA, 1251 bp, Bovine  19866881015258
  misc_feature (1)..(1): n is a, c, g, or t
ncccagtgttctcgcctggagaatcccagggatgggagagcctggtgggctgccatctatggggtcgcacagagtcggacacgactgaaggcgacttagcagcaagcagcagagaaatttgagcacagacatggggataaagaggggagttttgtccctaccattagaatataaattcaagcctatgaaataagctctgtgtgctacttcggtgagcttaagtgaaatggtgattcatcaagcatttattttgcaactatcacatgctggtaactctcacttacattgttgcatttatgaaatgtcttcagatagaaagcagtgcaagtgtagcagttttagcttcagttttgcagtctggattgcttttggttgtgcagcatttccgtagtcaggaagagaaggtgaagcttcactgcctcttcaaggaagagacaattataggatattgctacctccctctatccagctgtgacaatcttccatcccaccctggagtcctctcatcccctctcatcacgtatttgtgtgcctctgaggtaacacattatagaaataggaaaaatggaggaaaagactaagattttaatgagagaaaaatatgtgagacaagaaaggaaaaagtaaaaataaaagtggagaccccaaagtgacaaaaatgttatacagaaaataagaaaaaggtggtgtttgaaaatgagctttttgcttatatcaggatacttatttctacacctaaaacacatattcaacctagatgacaaaataacatgtaatctagtcacatgggggaaaggaagttgcagatattttcccaaagccattatgaaaaatgtgaccagcagaggccttacatttctattcctattctgaataatcttccaagtcagagaaggtggaaacaatgttcagtgtttgtaaaattgtggttgaagaaaggtagcttctgatttcagaacccaaatcacaagcttttttcacttatttgtgacaaaaatggagggcttttattagggtagggtgtttgtatagaaaaattcaagtaagcactggggggatttttaaaccctaatgaggtagctacctgctgcattatttagaatacttgagactccaactgctgcccttttgtgtaccaagctgccactgactgaagtaaggggctcggcattcctcccttaggaggtattatcaatgaaaatcctttaccaagactagtctctgaggtgtgtccttcccctgctagacatt

SEQ ID NO: 63974 - DNA, 1124 bp, Bovine  19866881221763
  misc_feature (1)..(1): n is a, c, g, or t
natgaatagcaagttgcataaaatcttctattgaggtcaagaatatttgactagcatgttgctctgtgttgacaatttcggtttcctagtgatgattcctttcaaatgaccattgaccctctttatacattaatgtttttctaagtggcacagatataacttgatggtatagactagagttaaattttatcttaagagtctttatttatatcttagaagtatctgctgctgctaagtcgctttagtcgtgtccgactctgtgcagcctcatagatggcagcccaccaggctcctctgtccctgggattctccaggcaggaatactggagtgggttgccattgccttctccaatgcatgcatgcatgctaagttggcttcagtcatgtccgactctgtgtgaccccatggacagcaacccaccaggctcctctgtccacaggatcctctaggcaagaatactggagtgggttgccatttccttctccacagatggatctaataaggctcaaaaatacacttctttcccaatctattggatgcaatgctcataatattcatttatcaaacttttaattctaattatacttttagtgctctagcggaaacatggaatacctttgatttgataatgttttccaaatattatatttatattattaatgaaattttgttgtttacataatactattgatctgccctgaatttctctttatagtcctctaggtactatgtcattatagaattgactaatgttctgattttcaagtcagaatcctgctgaaatacaatgaatatgaatacaaccaggtaatctctttttaaacacagtaatattgaattgcttccaccaatttctctactcaaatttgtctttgacattttacacctgaatgtaaattggcatagaagagtgtaaatccttttaaagtgagattggtaataatatgactgctgagtatctgaaagattgatttaaaagaagcttgtaaacagaacaagacaagatcagtgcagtcttccataattcaaagtagaggattagtctatttgcagaaatcaatactagtaactcacatcaatagagggtttttttaataaaataaaagcgaccattaataaataa

SEQ ID NO: 63975 - DNA, 650 bp, Bovine  19866881268175
  misc_feature (1)..(1): n is a, c, g, or t
nagctttcatccctcataggcatgaggcaagcacctcactgtgctctaattattgaatgttttttagtccaaaatctcccttgaagtaggtcataaaatattatgcccagccaatagaagctggcaaacctttgccaaaactttgccaaaggtattgagaaattcctgaaaggacaaggagagaaagctaaatgcatttagctaaaagctcaggaataccacagggatgtaacttttgaacattttttaatgctaccattactttgggctacttagtgcagtgataatttactaaataggagcaatttactaaagagactccagaaatgtaaaagaattattgcacctctgaaaaaaagtacacagcatttactctgaaaagatgagacccagcatttccaataaagttgatttactacttaatgcacatctgaaacagcctagtgttggttcagagaacagtttgtagcaatttgatttacactaatcaaatgaaatggtgcattttcctgacgtataaatgaagaacacttttttttaaattacttaagaaaatagctattcaagatatttggtcatcatgatggaagctagcaggcatttcacacttacattaaaatgatgaagcttagtagtctctaatgatacat

SEQ ID NO: 63976 - DNA, 1192 bp, Bovine  19866881748823
  misc_feature (1)..(1): n is a, c, g, or t
nctgcatgcatgcctaagaaatatgtgagaattcgctaatctctggttgatcttggggctctgcacaagcaggacatggaaagagcaacagaactgtcgattactggaacattgatggtattccccatcacacacacatacacagaagccaacgtagttacaggttcaaggcattcaacgaaatctttgcctaatcattagatgagcattaagctaaccaaacagaagctccacttgccattcacaacagcaaaaaaaaaaaaacaacaacaaaaaactttacagaatatgtctaggaaagtctctaaacaaacagaaacaacaacaataataagcaacaacaaatgttgaggggaagggatgaacctaatttccaaagttgccatattatattattttaaatgcccactactcaacaacaaacgacaggacagtccaagaaacaagtaaatatagcccacatacaggaaaagaggccgccaataaaaactatttctgaataagcccagatgttgatcttactatacaaagcctttaaatcagctattgtaaatatgttcaaagaaataaaataattatatccagagaattaatgaaaaatatgagttcaatatctcactgaaaaggaaatagaaagaaacagaaattatttaaaacaagccaaataggaaatatagagtaaaaaaataggatgactgaaatgagaaattcactagagggtttcaacagcatatttgatctgccaggagaaacaattagcaagcttgaaagtatgtctactgaaatgaacaaaaaaagaaaaagaatacagaaaaattaacagagcttcaaagacctgtaggacaacattcaaactcaccaacagatgcatactgtgagtcctggaaggaatatagatgaaaacatcctcagtaataacctagcaattgaaagtcagcagcagatagaaggataaaacacagtgaatgagtgggattcatcccaggaatgcaagattgatttaacatcaaaaaaatcaaccaagacacagtattccaaaaacaaagggagaggaaccatatgatcctctcaatagacacagaaaaagcatctgacaaaatccaacactctttcgtggcaaaacattaaataagctaagaaaaggaggaacatcttcaacctgattaacagccatgccatgcatgtgtactca

SEQ ID NO: 63977 - DNA, 4163 bp, Bovine  19866880472305
  misc_feature (1)..(1): n is a, c, g, or t
natcttctagtctgctgacttttcaataaagtccttttctttgacccacaattctctctcaatttactggtctgtcacatggtgagctatacaaacttggactcagtaacaactaagtaatcagactattctctctacatttgtcatgcttaaaatttcataaaaactcaaaacattaagtgaagtatttcaattaattagataaataaattctaagtcaacaaactgtttcagcttattttccttggaaatccatgcaaggaatgggtaatgactgcctattggtagagaacttttacttaaaggtaaagaatggtaaatactttattggaaagacaatatcaaatagacagagctaatacaaaggaaatccaatcactctcaaaatgaatttagtggaatatggtggcatctcagagttatttttccaaaaaaaatacagcaaaatatactttacattaaataatgtcagaaagtatcatctgaaacagcagccagcaaaatatccccattctttgttacctctaccacaaggggactaaactagagccatcacaagctgaaaaactcatcttcaccaaaagatacagatgttttccagaaaatctttttatacctagtcatcaaccataaaggttactcatttatctcaattctcctttccaaacttgcataactcacaaaaggagttactttactctcctgcctacagctgttatatctaaagcctaaaatagaccagcatgtaacagtctgtaagtagatactggtagaagaaagggagaggggaagtgagggagggaggaatgggagacaaaaatgtcaaaagaaagacttcagaaaaacaagttggaagctacacaaactacaaataaatccctagtttgactgaatataattttggaaaccaactgacagcaaagtgaaacacactgaatccttgaattttcatcatttatgaattccagaaatataattctcaaaagcaatggaagaaagcctcatggaagagcagaagaagaacaactacaagaggaaaagaaaacaggaagaaggaaagttagcgggaagacactgaatgagacgcgacaaccaaccaaccggaggtgggacaggatcaagagctgcagtcacagaaagggtcacctgctcacagcaaagaacacttccacatactagaacacattgccacacttgctgccccagagttaatcaccttcagttttttttaacctgttaacttccatcttcatgttaggtaaccagtcacttttctcatggcttcagaaagcagccactcttgaccatacatattatagaaaatctctgagtaagtcatactatccacacaggtgaggtcctatttgctgactatgatattatcagttttttccacattaccttggaatctgccactttatccagacctaactcttgaataaccttgttaatccgttcatttttttcgtaacttgtcattagttgttggaagccgaagggctgctgagaactgtaagttttctctcactgtcagagttcccatcacaacatcatccttaaagaaaaatggcattttaacaagatatatcagggcttttctaataccatcactctgtagtatatctaacttatccacaaaaataagatacccaagttctagctaataatgaacttgtgtgtgttgtgtgctcagtcatgtcccactctttgcaattctatggactgtagcctgccagggtcctctgtccatgggatacgccaggcaaaaatgctggagtgggttgccattctcctctccagggaatcttcctgacccaggaatggaacccacatcttttgcatctcctgcattggcaggtggattgtttaccactgtgccacctgggaagccccaataacgaacttgcaattaaacaaattacaataattccatgttcagacagctacatagcctgatggattaattttcatttctaacctgtataccaagagagaacacaggtcattatgattattactggcagacatttatagaatgctttacacaaggattatataacactgttctgagctaggggaaggagagaggtgagggtaaggcaaaaaaagtaaaatagtaatgtattttagaaatgatgtgataataagagttgatactactgcccttacaagggtcatattccagactttcttttcatttaatacgattctgaatcttataggatattatgaaaagcgggtataaagaaaagttgtttctatgattatgtcatatagtcaattggaagcacactcaactatcagccaaggcacttgcccatatgaaaaatcagaagaaatctaataggtaaagtcacaaatacttacttgtaccacataacctgagttacatttaaaattggcaggtcgaggtgctccattgatcaaaacatctccagataatccatgtggatccttccttgcagctaagatatctaacaacctataaaaagacatacattattgctttttttccccccaaatcaggctttacctcttagctaatttgaatccaaattaacagatcaagaaattacatggtttaactatacatatattgtaaatcttaccttctttttaaaaattatatgctataataaagccccaaaatatgaaagtaaagctctcttacctgatccagcacagaccacccaaactgcccccttggttgtctgaccttgggggtctccaggcaggcaatgtgatcctttgcttaagatataagccttcactatgccattggctcctctccccactttcaattttatccccttccttttccactccatagctcaagtcatagctgacagctgtatgtcaatcaccttatcgagtcttgttagtgtcctattagtaaagctgacctaataagacttcctcaggacacaatcacaagccagcacaactgcaccttatccgtagcaaccaataccaaaccagacatgcagaaaatgtgcaacaaacagacacctgctcatacgaaagtgttctttaaaagcaccttaaaactgggggtggggaataggtgaaggagatttgagaggtacaaacctccagtcataaaataaataagccacagggatgtaacacacaatataaggaatagggtcaataatactgtagtaactttatacggggacagacggcctgacttatgatggtgatcatttgatgaatgcaaatgtcaaatctctatatttgacacatgaaactaacataatatttatgttgactataattcagttttttaaaaaccacacatgaaaactacaaagaaaaagcttacttatactgttatactcacgaagatttgcctccacctgtgggtcccagaatggcattgaggccaggtttcatgactccactgtaaatgcagaaatatatccagttactgacccagtttaaagccagttctataatttagggtttgtatttaatacactcaatgaaggttgataaaatgatagaaaaaaaagcacaaatcaactcttaaaggaaggagaaactgaattgttgagtaataaaaatctagcaaacaacaaagaatgttaatcactagtcaggacttagaataaaaatgacttgggctcctctaaactcctttcacttaggtctctacaccatttaaatatttttagaaaaggacacaagaactttcaaagttccctgacgtaacagatgttggtgaagcgtctctgttacacttactctcctttcacagtgtaaaataaagtgcataataagtcttgagtgacgcttgacgatcattatcttcacatcatgtgactcactaccttgtcaagttctacacaattaatgtcagtggattcctagaatcatcagtagtagtgtcttcattgctcaaatctagtcagacaaagaagcagtaaacctgcaatgaaattcaatggctggaataaagcacctcaagggggttaaaaagaaaatatcaccagttctaaacccttacaaaattcttaatcaaattagaaaagtaaaatatataccctcaagatatatcattttctttcttgtaaagtataagtagaaatttatacttatttcttagtttagaagtggtgggacgagatacatatatatatatatatatatatatatatata

SEQ ID NO: 63978 - DNA, 741 bp, Bovine  19866881077394
  misc_feature (1)..(1): n is a, c, g, or t
ntaatgctgaaatgtatcattctaatttaactacagctatgcaaataaaatgcaaatgaactatggaagtaagagcatgcagaaaaagaagtatttaattcagtaacaaggctctatgcaaacagaaaaagctgctaacctaatttggtaaaaaatgcatcactatctccaaatggcttctatttatataaagtagaactcgaatttatcattctgacatctctgtgtgtacatcaggtgtcaggattaaaagtaatacattttaattagattggctaataaggcagagtgatttaggtctacagagcccattcaggcaagccaacttttctgtaatctacgcactcaacttttttcttccatttcttacccccatcctatgaaactattatcaattagtaggctaagcaagatatgtcaagtgtttcactggctctttaagaattgtattttatattctttccttctataactgctttaattttacaaatgttcaccaaaaaaaaaaaaagaaatcctaaaatggttaaaggttcatattctttccttgattatctttgtcctccccagatgtaaaacaaagatacagccatcattatattaggagaaaatctggagggcagggaatgaaattcattttagtttcccataaacttggtatagttcacacttctggttccagcaggatctgaaacaatcagtctgttcccaaatgcaggaaagtactgccaagtgctgctc

SEQ ID NO: 63979 - DNA, 759 bp, Bovine  19866881970218
  misc_feature (1)..(1): n is a, c, g, or t
naaaaatgtaacatatgggtaaaaagaaagaactctgcaaatttttacaggtgaaatgaaaacacataataatagtaagtatcataaaaagactttctagtgaccataactggtatatggcacatggtcaatacacatggataccacataatagctgcacttcaaattgaagcttgtttacatgtaacaacatggtacacatacataaatacgtacacccaatatccctggaatgcaaattttagtacctaataataaagaactttattaaaaaaaaatattcaaaagaaagcaaagatggagacgagcgataagaaataactgttaaagaaatgcaatctgtatcgcttctgtagaagacagcttaaaaaggtttttttgctcatgttttctttgaaaatttgactgacaaagtctaccagttaaataagcaactatgtgaacttaagctatagtatgagaaacaggtctctctgctattctccaagtgagaattattcaccagtgcattctctcttgcttgtctcattagctctcaaaaggtcagcatacataacagttttgaaaaataagatttttagtttttgttaagaaatagatttcttccccataaatttggtgagcccctctcttaatgaaaaaagaggcgataaaaacccctgcaaactcaaactttggctgatagcttctgatgatggttgaactttcaataaccaaaactctttttcattaaaatgaatcccacttaggttataaatt

SEQ ID NO: 63980 - DNA, 1138 bp, Bovine  19866880398655
  misc_feature (1)..(1): n is a, c, g, or t
naataaatgaataaatgagagagaaatgttacgttcttttggttactattgaatgcagtctggataaccactcacctccttacttataccctgcatccactgaattgtggaactgattccctaattagttgaaaataaaaaaataactaacattatttcaaaatagcaaccacatagcatttttccatatagactattccatcagttcagttcagtcgctcagtcgtgtccgactctttgtgaccccatgaagcgcagcacgccaggcctccctgtccatctccaactcccggagttcacccaaactcatgtccattgagttggcgatgccatcaaccatctcatcctttgtcgtccccttctcctcctgccctcaatctttcccagcatcggggtcttttcaaatgagtcaactcttcgcaacactcatcaatacatgtgtagggagaaaatgatttcaaatcaatacagtagagaaaaaacctttttaatgtacttttttttccaggcaaaagagcttcagaaaacatccgtcactaagcagttttacaaatggcacttttggttacattagataattggataccagccccacgtgtcctctctgacagactagttgtagatcagctttacaatgcaactctttcttaggataaaaaatggttaattttttctaaagaaaggaaaagctgaaaccctaaaggcattgttttaaaaatgtaacatttatttcatgctatactgtctattgttatattataattttaattattttgctataacttttaagaaacagagaaaataaatttcaacctaatttaaaaataaacatatatattaagtacatatattaatgcattttacaataccatatagtgactttgattataaacttccttttggtgcacggtagatttgtcctcttggtattgaactgaggaaaaacatattatacctgaaattcttctttgcatgagtaaaaccatggtcatgacaccaacagactccaaccaatttgcaaaactgaaatcttgggttattctgatcacggataatcaaagtgaaacacgattagtattcaccaggagagaatacttaacacttttcaaacagatcttaaagcagatattttcataca

SEQ ID NO: 63981 - DNA, 3068 bp, Bovine  19866880473206
  misc_feature (1)..(1): n is a, c, g, or t
nctgggatttctttggagggaatgatgctgaagctgaaactccagtactttggccacctcatgtgaagagttgactcattggaggagactctgatgctgggagggattgggggcaggaggaaaaggggacgacagaggacgagatggatggatggcatcactcacttgatggacgtgagtctgagtgaactccgggagttggtgatggacagggaggccctggcgtgctgggattcacggggtcgcaaagagtcggacacgactgagtgactgaactgaactgaacaggattggaagagatcaatttcatttgaatcccaaagaagggcaatgccaaagaatgttcaaactactgtacagtttcgctcatttcacatgctagcaaggttatactcaaaatccttcaagctaggctttagcaatatgtgaaccaagaacttgcaaatgtataaggtgaatttagaaaaggcagaggaaccagagatcaaattgcaaacatttatcagatcatagagaaagcaagggaattccagaaaaacatctacttctacttcattgactaccctaaagcctttaactgtgtgagtcacagcaaactggaaaattcttaaagagatgggaatatcagagcaccttacctgcctcctgagaaatctgtatgcaggtcaagaagcaacagttagaactggacatggaacaatggactggttccaaatcaggaaaggagtaaatcaaggctgtatattgtcaccctgcttatttaacttatatgcagagtacatcatgagaaacgctgggctggatgcacagctggaatcaagattgccaggagaaatatcaacaacctcagatatgcagatgataccactctaatagcagaaagcaaagaggaactaaagagcctcttgatgagggtgaaaaaggagagtggaaaaatctggtttaaactcaacattcaaaaaagtaagatcatggcatctggccccatcacttcacagcaagtagatggggaaaaagtggaaacagtgacaaattttattttcttgggctccaaaatcactgtggacggtgactgcaactatgaaattaaaagacgctcgctccttggaaggaaagctgtgaaaaacctagacagcgtgttaaaagcagagacatatctttgctaacaaaggtccgtctagtcaaagctatggtttttccagtagtcttgtatagatgtgagagttgaatcataaagaaaactgagcgctgaagaattgatgcttttaaactgtggtgttggagaagactcttgagagtcccttgaacagcaaggagatcaaaccagtccatcctaaaggaaatcagtcctgaatattcattgaaaggactaatgcagaagctgaagctccaagactttggccacctgatatgaaaaaccaattcattggaaaagaccctggtgctggaaaagattgaaggcaagagaagaaaggggtaacagaggatgagatggttggatagcatcaccgactcaatggacatgagtttgagcacactgggaaatggtgaaggacagggaggcctggtgtgctgcaggtcagagtcagccaggcctgggcgactgacacgggctccccgcacacgggagctgttcctgtgttagtgtcattactagggatagactgtggtgtgcgccaggccaggaaccgctatagaaatactgctcttgcctccgacactcggtgatgtttgttcttagcactggcgtctcatcgacagtgttatagatgggtgaaacaacggggccattgtccatagtgaggtcacatgagatcaactgtaaaaacaggagtttcagaatttttatcaagtctcgggaagaaggggaaacagctgcaggaagggaggaaagcctgagaaaaggagaagacagggtcttttgcaaaatactttgtcgcaagaggccacaagctatgtctctgactgagatttacccagctccaaacctagagggcatacagaagcagctgctttgatcagataacacaagaaaagcacatgagtataatgatcccaaccggtatttggtgccgaagtgaggaactgtgctttacaaaatctgttctgtttctaaactgttaaaggccctatgggataaaaccctcaactgcccttcaagggtgagattagaggaatttcttttaaaagtaatagaacatagcatcatggactatagcaagaactgtttattaatagaagctggactctggttaggcagacctgagtttgaataaacttgtgtgaacttgggcaaactactcaaatttctatgggcctctgtcaagaggagaaaccactatgtactttgcaaggctgagagaattcacggagctcattcctgaacaatgtccggcacatcctaggggctcagtagatggcagctgttgttctcaatagtgaacgctaggcggattcttttgcttaatccctgcaataaccccatgaggaaggtactgggattctcccatttttacgagggctagagaggttttctacctcaggcaaggccacacagctagcaggcagagtcaccactccaaacaagcctgagagcccaggattttcgtaatgaacaagttgtataacattgctcataagagcaacagaagtttagcgggtcgacagaaggcccggaacttgaattctcttgcataataccccagtggcaagccgaggttattgcgctccaactttgcagtggctctctgtttacagggggttgtaaaagacccccaatcttgccctgggtcttgtataagaccccctggtcttaccctgggtcttgtataagaccccccggtcttacactgggagaggcaatgtaagatcagcctgcctttggctctcttctagctccgtccggaagtagattccttcatctctcgcttaagtcaaccaaatgatttgtgaaaggtattctccttttcttagcctagccctgaccatgttccctttaattgtgtgcctacatgcatgctcagtcctgtccgactactgggaccccatggactgtagcccgccaggcc

SEQ ID NO: 63982 - DNA, 4275 bp, Bovine  19866880551734
  misc_feature (1)..(1): n is a, c, g, or t
ntagagattctgtggtaaaatgtaagagcgtattattgtgggagtgaatgtttaaaacacaaacagaaaaagaggagagattttcatgtggctctcaagtcagccagctaatctatgggaatatgggtcagaaagctgaagagggaaaagaaatacacactccagtctggacaagcaaacgctggaagacaaaaaaagagggctggggaagtccataccacttgaaaagattcacctcccagtacttgccaaatgtggtatctggaggggaactgtggcatgtcccgagaattccagacactattgtaaacaggggactggggtgtggcgtggaggctccgtctggaatctcatggagtaggaacccagcctggaaagacaaaagttatgctagatctgtgtcaagaagtcacgaggaacatatttcgaaactagaagttcatctccagggtggctggtctcaggacagggcccttacatgcacaaagactgagctccaagtcctctctgtggctcaaccaacagggactttttgctacccagaaatgccgtgaatgacttgcctaaggtgtcgtatggagtagcagagtcaggcagtgaccaagaacctgtgattctttgataccctgataaaccgaaaaggctcactcagtcgtgtccgactctttgcgaccccgtggactgtagccctccaggctcctctgtccatgggattatccaggcaggactgctggagggggtagccatgccctcctccaggggatcttcacaacccagagatcgaaccccggtctcctgcattgtaggcagactctaacactgaaccaccagggaagcccggataaaccccaaaagggaaatctaaatttggattctgggcttaaaatgcttcttactgcaaagatttcacctcttatagggcttcaggaagcctcaagtaggttctttcagtcattggggagctcgtgggctcttaggagactgccaaagctactactttttttttttttttttgcttcatctcatatatggtcagttaacaactgaggaaaagtgagtcagataatgatatctttgtgctctgtgtgccaaaaactccagtagtgcatatactgggagctaggaagcccccatttctgaagaaaattgagtctgtacatatagagcaaaagcataagtagagatggagaagcttaactagagcaacgtttcaagagaaagggactcttcggatgccttgtcccctttttctcccctttctccctcttgtccccttgtcttttccgtgggagctgaacaatgagaccatgttatttgtcgtccccttttgagggtgagaagagcgactgtgccaggacataggtgtagttgggacgtgggttcactgtgtcttagctccctaagctccggagggctgcactgacgccctcatccccgtctgtggcgggtgccgttctctgtgctcctgttcggccacgtcagtgtctctgctggagtgggcgccaggctgcctttcagttacccacgctatgtttctgtctcccgtggaactgtgagctcctggaggctgaaagcctcaagacttccagccttgtctggagaatcccatggacagaggagcctggcaggctgcagtccatggggtcacacagagctggacactgaatgacctagcacacacacatgatttatctctgtcccataagccaagatctgacactcaggtttgacaagggagggtatactgacaacacgtttgaagggagacaagtgacaggattggtgggaaagttattcccaggggaaagagaaggcgtcacgtgtcatagcatagagttgctgacagtgatcatgggcagtcctgcaaatcagtcagccttcatggaatggaggggtgacaagaagtaaggaggaaccagagctggtggagtctacagcctgcccgactattgactgacgcctgctccaaagaggggtggtgcgcgaaggagcacagtcgctcttttgctgtgctccttaatgggatagactgggtaatctaccaggtttgcatttgagcttggaggaatgtgttgggtaagcatgaaaacttgaatgataaaaagagaatagcttctcaaagaatcttgatacttctgcttccagctgaaaccaggaaattcagaggcagcaaaaatgaaatcaaggaaaacgttaatggaaattttgaacctagaaaaggtttggtttgagttttgaaggacagtctgacctggttaataactgctcccaagtactactgttatgatttgcaggctttttatgtgtttgttatatatttcatttatataatatttagcctattattttctaattcttaggggtgggtccctaaattcagcagcttaaccaaggcttctacatttactgcagtgctgatgaagcccaactaccctgaacaggcttgtgttgtaacagtgtgggctgttttgcctcaaatcagcagttctgcttgggagggtcatgcaaagtaatctacagagttttctctgttacttgtgtagaatggtaatactttaattaaagcaacatgtatacataatttaataagtgattgccagaaatgattttctctaatagaaatcatagcaaatttttttttttggttatcacttagggaatcgtgaattgccgaagcctcagtcgctaactattttgatctgtaggaccccaatttctaagggtccatggcaattctgactttggcctctctaaaatgggcagatcaagcttgaggcagttattgtgggtgtggcatgaaggtttgcctgctcatgtcccgtcttcttctcagaagatgaaggtttcaaacctttatttttcgtaagaggaatctaccttctggggtcttaaatgagttctttgctaactgacaaccttccttttgtattcaaaggaccctcttgaacgccacttattttatctatacatgttcctttaagttcttacctaaagggttttcctacgtgtcacaaagctacttactttaaacgctcattactgctcactttttatgctgaaataatgcatatttgagttgcagtttacaaataatgatcaaagagtgcctttctcttaattaaatcgttggttaatttgataagcctttcagggtcaaaggaattaattctataaaaatacaactgtcttgacttcccattcagctgaatcacttcacaattttctttcccatgtggattaaaattctttacaactggaaaataattattaaaataaatatggcatttgaattacagttttggtgactggaagccttgacccatgcgtaggtgatcaaataaaccaccaaagtgataggaacactaaccggattaaattaaggagaaggaactacattattaatagtaagcaagcaaatgttggacaacttgactctcttcatttgagtctttaacatttgatgtacattttaatctgtatttaagacattattttttctctcctagagagacatctcctctatggacggcctgccgtgctctatcggactagatatgatatcttatatcacactgactttgaaagcggttatagtgaaatatttctaatgccactctggacatcatacactgtttccaaacaggtcattgagaacattgggtttcatgttcttcatgtcattacgctccgtgccttaatagaatgattgctggcggaacagaattttgttttagaaaagactttaatttttcctgatgaaagaaatcctacattgggtctattgtaaaatattttgaattaggctttctgccatgttctaacttcacggtaatatgtaaaatggcatagcatactaattctgttagtttctttgactgtgcttgtcatgccccagtagtttcagaagctatcaagatttggctgtgagttttaatagacttattatttagagcagttttaggttcacagcaaaactgaatggaaaggacagagatttcccatatacccacagctctacacatcacagcctgacccactaacatcttgttttttttttttttaatgaaggtttgttttatgttggggtttcagttttggtaaagatgagatagttcggtttatatcagaaattagaaaaatttattacagttgagatatgtttctaatttctgaatacaaaggactacttcaactgccccaaacatagcttcttgttatttgtactcgggcacatacaatacataaacagttattttttttaaataggagatatgt

SEQ ID NO: 63983 - DNA, 1218 bp, Bovine  19866880809263
  misc_feature (1)..(1): n is a, c, g, or t
nccttaagaaccggagatgcctttttaaggcgcattgccagccctggttcatcttctatttactatgctttttctttaccacttttttttaacagccattggcacatactctgactaatgaaaaacgagaacatttttgttctttgctggaggagtgtgtagcaatgtcagaatttgaggaacaaaagttttttactcatgactgcacttaggtcatctcaaacaagtatctcggttgattttgagtcctttagagagcttggttctaaagtctccctgtaatcattctcggtgaaaattcttagttcaaaggagatccttcttctttgtgttctgtccacctttgacattgggagcgtctgattgctcccctttccatcacgtttccttggctttgttttctcaggagtaacagtgtgccatctgcttattatctggcgtgaggagcacaagaagacggtgctctcttcctgcttgtatttgtcctcacgtgaccatgcatttagtgtagtgtccagaagacttaattattcaggagtaatttgcatggaggcagttgcttttgttttggctcatcataatcttatgcatattaattaattatgcatgttaatccatactgtgaggatgttttgtagttaacttcttcatttcatataagacagcaccttgcatgtatagcacatgttcagaattattcgtttctcatttcaggcctatgttgttgtttttaataaagcatttctttattggtagatctcttatcttcttgtataaaatttccaggtaccagttcttggaaatatgtatatgttttaagttgacatttaattagatatttctgacttttgttaaacattgatcaggaagaccttttaatatcatttacttcattctcttaagtttcaaagtagacaggttttgttgtgtttaaattccattatattgtccctctcttcctccttagcatatctttcaacactacatgcgattcttaatttgaacttcagctgctctttatctcttgtcaaaattggaaatgtcagaattttcgaacttacttttcattaaatgtaggaataagaagaaaaaaattccactgatgaatggtggaagaagttgacatggatctttctgcaatggagtaagttacttaaattcaaagatacagtattttctgcattctcatttgttgtgtagcatacatctaaaagtatg

SEQ ID NO: 63984 - DNA, 1859 bp, Bovine  19866880999722
  misc_feature (1)..(1): n is a, c, g, or t
nttttggtgtattttgttagtgtttcccctgcattctccagagattggaaataggtaccttcagtgtttcccctgcattctccagagattggaaataggtaccttcagtgtttcccctgcattctccagagattggaaataggtaccttcagtgtttgccctgcattctccagagattggaaataggtaccttcagtgtttcccctgcattctccagagattggaaataggtaccttcagtgtttcccctgcattctccagagattggaaataggtaccttcagtgatcaagaaggcaggttttttttgccactgttaggaaaatttaagcttatatctcattgcacaattgcattgacttcccaatagcgactttggtgttcattttgtattgcatcttaccgtaaagataactaacaaaaataaatccaaatttattcttctggttttattcttggataatagctgcatgagtttagctttttattcttcagaatgggtggcatgtgcactgttgcagtaaacctttcttcctcgagtcctgacaaggaactgtgatctgaatcgggacttttcctatgcccacgtcggctgcaaaagagagacgctccagagaagcccatcgagaagcgtccttggaatctaggaagctgggcttggagccagcgtatttgctacgtgttcaccgtttgctgacttggcaggaatcagggctttacgccaagaagggcagagtgtgattactcaggtctttatcataatttacagttatgcctctcaagtggaggtgtagtggttagggccaggaattccttagaaaccacgatcccgaggcactggcagacaaaaccttccgattatttccaagcctaatgagccagagggacttgctgcagcgccactttgggtggttattttgctgctagataacttgatttctgaaaggggaacacagggaaagagaggaagttggtttggctctttgtcagcagttctggaagaatgtttattcagggcggagtttgagcactctgagaattcggggattatcagaacatttcagtcctttgatgtcctgcctacccagcaaatgctccttagctgaccccctgccctctgccagagaaagctcctcctggccggggctcagtgtgttccccgcagcttccaagtgtgcgggtgggggaggggtggccccctcaacgttgcagtgagactcacggaatctgacatatgtttggggaggtcactgctgtccttagtggtggcttatgcggaaaaaaaaaagatttttaaaatgcaagttagcctagcattccttaaaagaacacctcccatttttttgtttgtttgtttgttttactctgtagtcaaaaatgctcctcttgataagagcagagcagtagatattaaattatgtagcttggggctttctgggagataggcctttatggagattatagtacaatatgtaaaagaagaagacacaccttatttagagctgtttagtggtccattcagagatgtgttcagaggttgaaatctgagatagagtgtcgcttaaaactgcgtgtaccggaggcagatgtttttcagtatttgtccacaagcccttgagaacagcgtccttctctgtgggcctggaccacctcctgtaccggcaggattagtcaaggcgagtgtgtttctcacggggcagatgaggaagctctatcttctcaagaaagagaaggctctttcttctccaagagctttgcgtccagcttgatgggcctcctggaggagggtcacaggactgcatccctgcctcctcttccccttcagacttaggaaaggaaggtgtcagcaaagggcgacac

SEQ ID NO: 63985 - DNA, 901 bp, Bovine  19866881335528
  misc_feature (1)..(1): n is a, c, g, or t
ntagaacatttaatggtttctgtgactgtgtaggtacctggtattaaggtaggaagcatctttacagtagagggcttgccactggggcctagggcagtaggcagctccttttaggcatcataaccctctgttcccttccgtttgtacaggttctggacatctacacgtgtggatagatgtgcacgctgaccttttgttattgctgttgtttgtttcctaggcacttcacacgactggaggttgcggtgtggcgctgtggacttgtacttcacgctttttggcctcagtagaccttcctgcttacccttgccagaacttggcttggtccttaatttgaaagagaaaaaagctgtcttgaatccaaccatcattccagaggccatagcaggcaaccaagaagctgcggtgaatccaagtagtcacacacagctagttggatttcagaaccctgtaagaatcacatgtgatacggaaaaagtatcaatagttttattatttagagctccaaagaagagaattgtttctttagaactagaggatttgagagccactaacagcttctcgcaccattttaaaaagtgctggctgacactgtctcagcacttgacagtctctaaagagctgctgacagctgcctacggcagcgcagcaggtgctgtgatgccagtccacccactgctcgtgatgacagtgactttctgtgctggagcctaaagtgtctcctttgagtagtagaaaattgaacatttaaccaattacatattaaccgaacttgtctgtacacaggaccttgacttttctcttttttttgctactttgcattaatagcgtcattctaaacatttgagaagtgcctgatgactgcttattgaatcattagtaaataagtagataatatgaa

SEQ ID NO: 63986 - DNA, 1476 bp, Bovine  19866881343204
  misc_feature (1)..(1): n is a, c, g, or t
ngactagggtgagaaagactttggcatgtgtgagggtctgaaagaaaacaggtgtgcccagacacgacggtggggttgtcagggaacgggtcagcagatccttgtggggaccgtctaggggtctacgtgcaaggaagataattgagaagtcacaggggatggcagggtatacgacaggcttccatttaagattcagtatactggcctggatatgccgtaattctatggcctcctctcaatgtcattccacaaaatgcaactgatactagagagtccacccatttaggtgcagtaattctgcactaatactccgaacggcaagatagaagggtccgtcccattttgaagaactatttgctagctccttgcgtagctagacttgcacttcccctcagactgaactcttctcaaaatagactatacctgaggctttgggggtgagcagttggcagatttagttgagcactgctcctctatttttaatccttaggtcaagcctcctttctcagaaataaactgcataccaaccagcgtgcatttcaggtgagcggttttgccgacaaacacatgtcattcattgggggttatttatgaaagtctctgaatggacagggactctgttaaaatgaggtctggaagattattttaagttggaggtattttttaaatttttttttattttgagaccttggtccattcatactttcattgagcaagctgccaacttcttgcgagcatggtggtcctgttttagcggatagcttcagaaactgcctctctaaaacgagctcactgcaaacagggtgaaccaggaaagcgaccacagagtttctcaagggcaaaaacattctgaattgttcttaagagagctgactttaaaaaaaagaatctctgcacaaaagcagggtttggtgtccactgggtttgcccagattccggcccgttccgcctcgtctggggaagggctgctgcggactgaggatgttcctccctccagctgtctctctagctctttgctgagtcaggtcggggccgccttgtgggtgggaagtggtgaaggcgacaggaattatcccatgaggggagggattgtccggggccgtgaggaacaagatcgagctgtttgagcttggagattggggtaagcagagggccgcgacagggtcaccaggagcgtcaggagctccaacctgggtcgcatttctaggaagcatctgtccttgatcccttctgtcccatccatgtccccacccctggcaggacgtctagtttcggatggaatgtgaaggtggacgtggtgccctggccctgtgaagctttgccgtctggctcttgggagcaggcaaagctccaacccctatgtgagctctgggctctgttcccactaattccttcacagggttcttttcctgcctttaggtggaaactcaggtgctattaatgttcagctgaatacttgagacacttggcagcgtt

SEQ ID NO: 63987 - DNA, 1585 bp, Bovine  19866881354298
  misc_feature (1)..(1): n is a, c, g, or t
nctattgtgctcgatctgatctttctaaataactgttaaaatgtacggagtccctcctatatgccagacactgttccactcactgtcttcatttactcatctacccctttaaataattctatgagttagttatcatcataattctcatttttaaaataaggttaagtaacttgctgaaaacaagagctaggaaaatgatggactcaagattcagatcaaagtaatctagatggctgttaatcactaaagaagattgggtgctaattataagattcactagaggaggaaaaaaattctcaacttttattgcatcagctcacacagcctgtcagatattgcaactgtaatcattgttagctcataaaatagttatgattacacgattccctttttcacacaatgaccaagcaccttgagatttttgtgtgacctttgcaaacatgatgaatacattttttactcccataaatacctccctcaactgcttgagctgctctccagctatcttgtccttgcgtggaggacggtagacagcagtcacgtgggtaaatggctcacagctgcagccgctgaccctggataatcaggctaccgagactgtgcccaggcgtataatttcctcttttaaagacttagtcagagcactttaacaatttcaacactttatcaagcccctttcttggtctttgtctgaaaaatacattgatataacattgtgcaacatgcaaagcagttctccatgcgttatacttttaatcctcccagcggcttgagggtagttttggtgatcccattccccagtggaaaccagtaactgagacattgtccctgggagccgtgaagaaagaacttggggttttctgcaaaggaagctagctgccaggtccagacaggaattaaccccatcttctcagtgattaagaacactgatgagttcagcccagcctagaatattctagccaaaagaaaagagagagggagggaaggaagtgtcaaagatggaagaaagagggggaaggaaaagggtgctgatgactgaggaggctgaagacaagacagcaacttgcccaaggccatgtgatgttacaggaaaaaaagccattctgacgcttgtttaagttgtaaggagggttttatttaagactgttgcaataggagcattgcagcggggggagggagacggctcccgtccaaggacagcaagagcaagtggggatttacagccttggagcagggcaggggcacgagcagatggaatattatatgggaggcgccaatggtcgacgccagggacttggacatcaaagatggaggaggataaactcaaaataacaggagtgatcaggtatcactgtttgggggatggcaggattctttgctaaggctgggctaggtcggtcaaatgcccccctcttgatcctgggcgatcaggactctttgactgacagactcaccacgtaggggagggcattcttccacaaaaagaaaaaaaagttgttttggaagttctgtaaccgtagggataggagcccaggtcgagggctgttgaaaggagggcgcggaggagcggacggagcccggacat

SEQ ID NO: 63988 - DNA, 1842 bp, Bovine  19866881358717
  misc_feature (1)..(1): n is a, c, g, or t
nacgagaagtgggtaacgctgtaagtgagaaagcgactcccttgggagggatgtcctgacagtcgctggggcagcgttcactgaccacccttcacaaagcgctctccgtcagccctaactcgtcttgcttccccgtgccaggtacgtggagggcagctccgtccccgtgcccacccactactacagcatcctcaccagctgcctggacttcacgcagcctgccgaccgctgcgacgggccgctctccgtgtccgccttcgtgctgccccacaggcccgacaacgacgagagctgcaacgtgagtgcagacatggcggccctcgaggctgccgcttccgcttccgcccgcgctcctttatctcacgcgcatttcctgccccattttcattgctttaaaagtctctgtattgttattgttttttttttaatttacttgtttaattttatttatttttttaggttttgttcagcaagtacataggtacttattatttattatcattattattatccaaactagaacatttctggaagtgaagggaggatgctatgaaataacaactgcagacagcagggatgagccaagcttaaatgggcggcacagtttcaccctgtgtgtaaggcataaggggaacttgtttaattgtagctggaggatcatcgcttcacaatggtgtgacggttcttccgtgcgtccgtgtgagccggccctaagcacacgggtgtcccctcccacctcacccctcccggtggtcacggagccccggcttcgggtgccccgcgtcccacatcacactccctctggcgatctgttttacgtttggtaatgtatatgtttcagtgctattctctcaaatcatcccaccttcttctgttattattttgtaattggaatatacgtgctttacagtgttgtgttcgtttccactatacaatgaagtgaatcagctatatgtatacgtattaaataaaacgggacaaatgactgtgcgtcaagtttataacataactgcgcagagaaaagaattcaaataaactatatgtattctgactgtagggcttccgacgtggtgctagtggtaaagaacccgcctgccaatgcaggagacataagagacgcacgtttgatccctgagtcaggaagatcccctggagaagggtatggcagcccactccagtattcctgcctggagaatcccatggacgcaggagcctggagggctagagtgcatagggttgcaaagagtcagacacagctgaagcgactgagcacacgtgcactctgaccatactcccttaatgggatacagttcaagaacaaataaagcaagcaaagaaaatttgaactttacacagtagatttggtgttgctagtgatgttgatattttaattttgaaaattaaaaaaatgtactgttataaaaaagcagtgtcctttgggatttgctgacagaattcatctttgtgtcttaaattatatccccacccttgaactagaacacacttattataaaacatttggactatacaaatggggatacaagttgagtcttgggaaaggacccaacaaaactgccaaacacttgggaactctgagtcctaatggcattttatttttcaatgtaagggtattgtgcatttaattaagttctatttcagtgtttgctcttgacaaatgataaaagtgctcaaatgtcttcagttttgcaaaagacaaatatattttgaaaacagtgaaaagcagcacaactttggtagttactgaaatgagggaagagcagccaggagctcattatatcattcactctacttttgggatgtttaaaatttcattaataaaaa

SEQ ID NO: 63989 - DNA, 1152 bp, Bovine  19866881378718
  misc_feature (1)..(1): n is a, c, g, or t
nacttagtcctcacccttaccccccaaaactgctgcagagcttcattgaaaaggcttagtgttctggttctcgatggtaattttctccacccatttcaaaccttataagaaggtagcttttgtgtgctccaaagacgcctgtagttttgctttgcttctcagactgttcttcttttatctctatcttggaagtgacttggcttcattttctttcttttaaaaaaaaaatgtctttagaacttaaaaaaaatggtcacacttccaggtatttattggaatatatgtcaaggaaatctacacatcatccatactgaaaatttttaaatttaggcagattcaaacgatagccttagacctttgacagtcatctttctaacctggttccatcctgcagcctagaattagccttgcttttcaagtgatagtatttcatttcagaatcatgctcagctgtgtctccattatgttcttttctgtcgactcgtgctcagagcagtagttccccttgtgtatgggtctcagattgattccagtcccagctctgctgtgcaataggttgctgaccctggacaagggttgtaatctcttgacaaaccaatgtcttcatctgtaaatgggaatggtagagtctttaccctagggcatcatgaagatagaatgaattaacaaatggtacttgttttcttatgcacattatctctttcaacaatgaccagacaatggctatctatatatgacctaaggtaatttgttcccctttagcactaaattcctcatctagttcatcttccttttttttttttttcctatttccttttcttcttctaacatgtctaatgttcttagtctcatgagaaattctgtatcaaccagaaatggtgaagacaactgcatgaatccctttctgtttggagtacctgcttcctttgtcagatctgtttgtactgtgtctgcatcagattttaaatgttcatggctcggggccatgtcttttctagtctctgaggctttttcataaatgcagtcttagatctacagggaaacttggagaccactctgtgtgactccccatgtctgtgatcagaacgccgaggcttagagaggtgaagtgttgtgcccagggtcaggtttcagcggatacgcagagcccca

SEQ ID NO: 63990 - DNA, 2045 bp, Bovine  19866881437494
  misc_feature (1)..(1): n is a, c, g, or t
ncctaaggaactccagcaggtaaagagggagaggtcggaacgtcccggtggtccagtggttaagactccatgcttccattacagggggcacggattcaatcccgggtcagggaactaagatctacatgccacgtggtgccaccaaaaaagaaaaaagagggagaggttggacaactccaatactgtccccaattgagacaagtctggcaaatctcatttcatcctggaaaaacacagttactcagtgatcaagcatgcttgattttagagaggtcatttctgaggccagttgtcttcaccctttaggtttagtctgaaaggagcaacagagtagggaccacatctgccttccaaatccttccgtcctccacatcctacccggaatgtactgtgtgcttgataaacaactgtggatgaataaatgaatgggtgtctgggaattattttcagtctttcaaaaagcctagtgccaccagtacatttgccaggaagaagtgatacgtgccaaataaaatagcacattgttttccttttttttgctggaatgatatcaaatcagtgtgttaatgctgagcagaaggcatgcagttcagaagctctcattggttcctgatgacatcacagtccttgttagcagaccccgagatcagataaatgcaatactcaaatgaaactagttgatggacccttgtacaaacctaaagccaaaataaaacagcccctagcaatgaaagatttacatatctctccactgaggcaatatcatctcatgcttaagagtacaactctggagccagacagcctgactttaaatcctggcttctcatattagctgtgggacttgggtgattttcttaacctttaagcctcagttccttcccttacataacagagacattaacagtagctacagttccttacacagagttgtcatgaagattaaattctatgaatctgcaaagtgctgggcatagattgctgccctggctctcagatgctcagctgagtctgactctttgcgacccatggactgtagcccactgggttcctctgtccgtgggattctctaagaatactggagtgggttgccatttcctcctctagggaatcttccctacccagggattgaactctggggctcttacatctcctgcactgcaggtggattctttaccactagcgccacctgggaagcatagattaccgtattaatatacatatcattacttgatattaactattatttctgttattggtaaaataagagtctctagtggttgcattgttatacggctacttaactctctgactttttaagatccattctaactttatgcttcttctactagtttagaaagaacacctagaaaaaccttcctgtctgtttctgtcccttcatctctctctctctctcactcagtcacacacacacaaatgctgcagaccttgtgccttttggtttatattggcaaaaacatacactaagtattaaatatcaacaaagaaaaagcaagagcctttaagtactgtcaagaacatagtactttattccataaggtttttccatgccatggctttaacattttgctttttctactgtttctttttccagaatttatagtttttcttataaaaaatataatattgcacccagtttaatattatgagatattatatttaagatatttatttatagtgtgtatatatatatatttcattagaagtccagaaatgtgctcagaatctagggaaatgctagctcaataatcattacttccttgtcactgaaagattcttaaatatgaaacagtgcttctgtaagtgtggtccccagaccagcagcatcatctaagaactttttagaattgcaaattacagggatccacatcagatctactgaatcaaaaccctgggtttaagacccaacaatgtgtgttttagcaatgtttagtacattttcatgcactcttagagctttagagctactgattttagagaattccaagtctcatcactccacgatttatggactgtgcctaaaaagg

SEQ ID NO: 63991 - DNA, 988 bp, Bovine  19866881529260
  misc_feature (1)..(1): n is a, c, g, or t
ncccgtcaccacttcgccccaggcacaggggcatctttgatctctcctgctcagagtctgaacactcactgtttcctctgcttgggttactttcactgttcccatgagctacaccttcaccttctcattgacgttttccttaccatcctttctccaatggcaattccattctttcttgtacagaaagtcccctaaatacgaacgaattccaggaaggtctcttggacatttgatttacacagtctactactgactgtaattataagctctataggacagggatttttaactgctttgtaccttgtagttatcctggtatttagaataagcacttggaacagtacacacacaatacatagctgttgtgcatatgttattaactgagtgctgattttatttctttttgcaggaattcttccaagtctctggaaatctgggagaatgaagggacatttgcaagtgtagcttgaaaatgcatatcaattctattttcctttgcagaggtggtaagtggttgcctgtaggacacatctggtctgctgattctttttgtaaataaaattttattgccatacagatatgctcattggtttatctattgtctaatgctgcccttatgctctaacagcagagttgtatacttgcaatggaggctatatggcacacaaagccatatagccataaaatatttgctgttggctcctttgtagataaagtaaatgttccaacccttgttcttctccgtttccataattttaactgagggtattgctgatcattaaaagaggatcagattaaaagattaataaacattctcaagtgaaaataaaatgaagcacaagatggctttcacaagggtcggtttcatttagaccactgggtgtctctcttccctaaactttacaagtaaatgttgaatcagacatcagccaacttgggggctgggacataccagacaaatattggacagttgctaaggcaactgggg

SEQ ID NO: 63992 - DNA, 824 bp, Bovine  19866881711350
  misc_feature (1)..(1): n is a, c, g, or t
naaatctcctgtttttaatataagggtctctaaatctctctagagatttgtcatccagacatccttacccagtgataggttcccttcaaactttttctaagcctttataatatttacttctaccagaagggtgcacaagaagaggaacccagctaaatcctgtggttgccaatttgactgttgtctcttctagttgttaaggatactttgcttttatcacattgagcaggattccgtcttcccacaagcacctctctggggtcataattaaccttattggattaaaatcacctataaaaacttagtttttgctactctctgtacaccatactatggattcttggtacataatgtttgctcagggactccataatttttacttacctgcttatcgctttagttctctccttaactcaactggaaacaccaagaggcctccagggcagaatatggagtcccaaacaattaagagatgctgagagttataggaagattgagaattgttgggactggtgtctggggagtcatagccagggcctgtagcccggagacagatgattttgatttcccaccttctctctgatgtccttgttgacagattatgtgaaactagctcccccgagcctagtttgtctgcatttactgggtttgcaggtgtttggctccatcctattaatagaaaaatgatacaaattgtctctcaagacttagtacagaaggatctcacgtatcatagaaaaccagaacattagagagttgactttaaagaagatctagtctcccccaattttatctacttttgtatttgaattattttcttcctt

SEQ ID NO: 63993 - DNA, 1344 bp, Bovine  19866881253120
  misc_feature (1)..(1): n is a, c, g, or t
naatgtattttagggtatgcattttgaagaaacctttgacaggatttatagtaataatttcagagaataattcgggtatctccttgcagataccaacgaactacaaacagctcatgaattttcgtcatggcgacctttcgggccaatcagtgaggaacaggaagtggatgggattggacccaggctatatctgagccacagctctccccgccctctctctctggtgcttctaggatctgtgtggtttcctactggatgacgacttcgactagattaaatcccactctcaacttccactcatggaagaaactgctggaacctcagtgccaattttttatgaaattgccatgtgaatttgttgagtccagaaggtgtgttctcagtaatgcctcaaggctgtccaccaactgaattaatacagcatctcagcaccaagttcagcctgccatctcctcctcgtagcaagatcagcctaggctggaaccctcagggaaagcctccccagagcaccacagcttagagggaggggaaaggaaacatttctggaaatgagagtgacaggagcagagttagagtgatgtaggtgatgacaggtgatgatgtggtgaggatggtgaggacgactaacgctcattgagagtctaccatactcactcccagagctgtttaactctttccaagtgtaagttcatttgtctctgacacaaactctataaagaaggtattaccactattttacagatggtgaaattaaggaatggagagaatgaaatgcataagttgtccaaggccacatagctattaaagaatgaaaataggtgggacaaaaagaagattgctgtgatatagtgacttaatctgatttaaaaaaaaaaaagatttattctagtatttttcttgtcatcccctttccttcctgcccaccaccaaatatttcaacatatgccagagcttgttttccacaaacctgcaaaaacatcccttagcccctgacccaaggggtgagaaagccattgtaattcttgctcctgcatatacttagaggaatactggcaagaagttttcctaacttcatttctttgatttagcttcctttcccaaacacagcatggcatgttttaaaattagtttcttcctacaagtagaaattgcccttgaaatttagtttttgtctaaatgatctttctttcctgtttgcttgacttgagccaaatatgagacagcttactgaaatgctcgagttccatttccttccttactacttctcttcctttctgtgtttacacctccttttggaaaatgcctctttccctaaacacacttgaaaaactcattttctcggtg

SEQ ID NO: 63994 - DNA, 1445 bp, Bovine  19866880476148
  misc_feature (1)..(1): n is a, c, g, or t
ncgtctgcctacaatgtgggagacctgggttcaatccctgggtcaggaagatctcctggagaaagaaatagcaatctactccagtattcttgcctggaaaatcccatggacggaggagcagcaatttcatttccaaccttgttggtattttaaaaaaactttatttaatgaaacactcataaaagatacctttgtattgcaaatatcttttgtatcaaaatttccatcttaggttttctcttaaattgaacagtcaagaaggtaattaaagtgttgttatcaacagataaaataaaaataaaactgtccccaaaataagattactaaggttatctgattaacttctacaccttggtacaatccatataatatggtgaaattgaagtgaattattgaatagttaagtgaataatgcatttacctctgaaatcaaaccttcaaagacttctgttcaaattttgcaattctaatttcttccagaaataccatttccttacgacatatttatgacaaaacatgaaaattttaagctgaggaataacaaatttgttttcctaagataattaatattaaaaaagaaaaaaataacaaatttcaatttaccttgtgcctgctaaagaagttagaagatatgaagtggtcatcattcaaacacaaaggtgaagaattaaatacaatacaagaaataaagttacttaaattttcttccttaaatcagattattttcttctaaaaagtttctgagatcataccaatcaatttgtcatgttttctctaaagactaatcattcagactttatcttttactcacacacttagaaatgccattcacctcaaaatgatacattaacatatttttcaaagacatattcacagatatgcataatgtgacttattagcataatccacctgcttataacatttggaagtatagtagcaagtggtaaatagctatttagggttaaaataaaattcacaatccatgagctatacctcaaaagcatttgaatttgtgaagggaatggtaacccactccggtattcttgcctggagaattccatggacagaggaacctggggggctacagcccatggggtagcagagagttggacatgactgagcagctaacactttcagcacatcaagctcattacctgcttagtcttaatggttgacttattctaagattttttggagagaacatggttgtctaaaaatgtgtaaatacatttattattagggatcactttccactatttgtcatgtgaaccttctgtctcctatatcatccttcacatgcttcctgttgtcagtgctgccacaaatataaatgccacctgcaaacgcagaaattgttatcaccccagagacatctgttcccaccatattagaagtgacttggtttttaacaagtctatcatttctagtcacaatctgtgagcaat

SEQ ID NO: 63995 - DNA, 712 bp, Bovine  19866881703225
  misc_feature (1)..(1): n is a, c, g, or t
nggtagagtaaaaatatttcaatagaaatccacggccctcctcaaggagcccactctggcatttgtagccccccagtcgtggtagcgcctgtaatcccccggccgcagcaggtactgccgcccccggtagttggtcatctcgtagaggacccaccagccctccagcacattgaaggaatggatctcactgaagtggaagcggtcgtggagtgaggagcagtcctctgtgatctccaccatctggcctcgatagtcctctcgctcatagatcctcagccggtgggaaccagtctgtgggttcagcaatcggcacatgggagaagtcagagaacctagtccttagccactaatcactcacacccctgggggaatgggcatttacaaagtcttttttacatcagagatgacaagtttaaaagacaggcaacaccagagccaccgtgtgcaactgggtagactgcaaactgcagaactgaagggtgtgctattcacatagatcaagatatgcatggttctccctagagttttccagggccacaacctacatgaaccacatttagtacctacttagtaccattcttaagaaacaatttttatatataatttttttgttctttccttgatagatttcttggtggtctggagtcccctcagaggatataaaataatttagatgttaaaataaaaaagcaaatatatctcttgcaaaagg

SEQ ID NO: 63996 - DNA, 629 bp, Bovine  19866880371275
  misc_feature (1)..(1): n is a, c, g, or t
ntctcctctattcatttccctctttattgttataccagtgccatgcagattaaattaataacataacttaaaaacagtcatcctcattaatcttcttttccaaatgtataaaggatcctgatactccaaatgatgtctaaaatggttctgtcaagtcaaaaaataccgactaagattttgatttgaaattcatcttaggcagagttccttggggatatagacattacgatggagatttgtttgtaggtggttttagaatgcctgtaagaataaacctatgagagagtgaaggctgcagaggagaagtccaactatgatgtagttgcaacagaggcatcagttgatcccatcagaggcttcagagctaggatgattcttctattgaccagaattgaaagaaaggggttacttcaacaagtcaacagacacagctgagggaggtctaacaggcaaggccaaggccattcttagggaaggactcagctatgagttgtgagtagtcaacactcaacctctggaaataagtgctgatcctgaatgcagacacaggtggtgtgccagagtgtccactacacaatttttacaatattgcttcatttctcaggacaatgattagctttctgttttat

SEQ ID NO: 63997 - DNA, 1022 bp, Bovine  19866880452161
  misc_feature (1)..(1): n is a, c, g, or t
ntcagtgccttgcaatgatgttccccctcagtgtgctgctgagagcacattagaaggtgctggagtttttatatgactgcattgctgtgagatggaatagcagcttcagtttccattaggttttagaagtatttcattctttcagatgttaaactaatttttgtattgtgcacactaggatgaaaaaaagataagaaatatgcacattctgaacaaccagtgttctcctggtattgtgacaagatgcagaacagacagtctgtggacatggtgctggggaacttgtagctcgtcagcaggagaatagatggaacccagaggagagggctcttgctgggttttatagttgaagctttaatgttttttaactttgatttgctttttatcattcaccgaaaacgaagggtggcaagtgaggatctctattaaaataatgacacagagttgcttgctatctctggccttcattggggttttggttattagaacaatgaagtaacagtcacaataatggcttttcttcctgttttgttctctcctcccagttgggtttctgatccttttttttcttaagatggtgggatcctagagtccaggactgaaaggcactgtgggggttgtgccaagtacccagaataggccagtcgtcccagctgcctttttaggtccaaggtgtctgacatagcggtcttcaggtttccttcctggtggactctctaaagctctgccgtccaatatgatagccacgagctagctccatgtggctccaaagccctgaaatgtgacttctcctaattgagatgctgcaaatgtaaaatacagatttttaaaacttagtttgaaaaaatgatgtaaaatatctcattagtaattctttgcattgctcatgttgaaatactggttttgatgtattgagttagataaactaatttttaaaatgtatcctaaaaaaaaacttgaatttacactatgacataagacaaagtgttctcactatatatatatatatatatataaatttg

SEQ ID NO: 63998 - DNA, 1937 bp, Bovine  19866880468812
  misc_feature (1)..(1): n is a, c, g, or t
nttttctagaagaatgttgttgtttagtcgctaagctgtgtccaggtcttctgcgaccccatgactatagccctccaggctcctctgcccatgggattctccaggcaagaatactggagtgggttgccatttccttctctaggggatcttccaaacccagggatcaaacctgaatctcctgcactggcgggaggattctttaccactgagccacaggggaagcccttcttgaagaataacgctttgttatttccctaaagtgttttcaattattctgggcccaaggactgagctaggagcttcttctcttcttttgctctcaaaaaggagagagggtcaagagcaagatgacatggacctccgagtaccttcacaatccttgtagaatttcctgaagttatacacacaagcttgaaagtatttttcacacaaaatttgagtcctgctaaatacttctcccatacatatatgtggctctaaatatgggccaactcagttaagctgctgttcttagcaataagcattaaacagtcataattaaactagaacacttaattttaagagtcactataagacaaacagattcatatgaagggaaccaaagcaacacagattataatatccagagagggggctgaagagctgtgaaggaacaattcttttttagttcagctacccatgaatgaattgccatctttcattttgttattgttattgttgttattgtcattgtttgagggtttgcataatttctgatgacaggtggttatggtcaagtctcttcatcattatgcagatcccgtgatgctcatattctgtctcagataattggagtaattagcaattaatttttttgccaatagagactactaaataaacctgaaaacccattaacagcaccaatactttctcttgtgtattctgacccattaatttgactaaatccactgaactagtccactaatctatttaatcaaatcaaatctcttcaaattgtccctcatcctctttatcataaaagcaagaatggatttagttatacatattctgggtagaagaaaacactgaggaagcaatgtttacctaagtcttggcttagtaggaggtggaagaaagagtggatcatggaagaggtagtaataggatatagatggtccccaactttcaatggttccacttacagtttttccagtttatgatggtgggaaggcgataagcattcagtagaaagcatactttgaactgtgaattttgatcttttgctggggtagtgatatgtggtataatcgcctcttgtgatgtgaggcagccatactaccaagagagtaagcaaccgacacactcgcaggcactctgttttatactttcagaggtcagtaaagtacatgagatattcaactttattatagaataggctttgtgttggaggattttgccaacctgggaactaaaaggttgttctgagtgcctttaaggtaggctgggctcagctatggtgttcagtttagttcagttcagttcagtcactcagtcatgtctgactctttgtgaccccatgaattgcagcacgccagggctccctgtccatcaccaactccccggagtgcacccaaactcatgtccatcgagtcggtgatgccatccagccatctcatcctctgtcgtcccccttctcctcctgccctcaatccctcccagcatcagagtcttttccaatgagtcaactcttcgcatcaggtggccagagtactggagtttcagctttagtatcattccttccaaagaaatcccagggctgatctccttcagaatggactggtgggatctccttgcagtccaagggactctcaagagtcttctccaacaccatagttcaaaagcatcaattcttcagtgctcagctttcttcacagtccaactctcacatctatacttga

SEQ ID NO: 63999 - DNA, 3377 bp, Bovine  19866880477948
  misc_feature (1)..(1): n is a, c, g, or t
naggtattgatatttctcccgcaatcttgattccgctgtgcttatccagtccagcgtttctcaagatgtgctctgcatagaagttaaacaagcagggtgacaatatatagctttaacgtactccttgcctgatttggaagcagtctgttgttccacgtccagttctaactgttgcttcctgacctgcacataggtttctcaggaggcaggtcaggtggtctggtattcccatttcttgaagaattttcagtctgttgtgatccacacagtcagaggctttggctcgttgttagagttgccaaatggagaccaccctgtgcttagtcgctccgatgtgtctgtctctctctgaccccatggactagcccaccaggtgcctctccatggggattctccaggcaagagcagtggagtgggttgccatgccctcctccagggtatcttcccaacccagggactgaacccaggtctccctcattgtaggtggattcttcactgtctgagccaccagagaaacccttaccttacaagtgttttacaaaggatgtttcttttctttctttggtttccattaatctatgttatcagatagaccgtgtcatttagatttttataaaccttcatttgaattttcaggaaaagattggggtcacacctgatgatactgaagaaatggttttaaagattattcctgagacataaccaggaataatgaagtgagagagtattaccgttagctactattatgattgtcatcatctgtgtaaaaaaaaggggggggggatattatcattagttggcggagcattgggaaaactgacaaggtaaaacatgacacacgtgaaaaatcctaaataattacattttaaattacccaaggaggaaattttgcattaactttccctgggctttttcacataagcatcaaataaggttaagctctgatggaactgagttttattttgtagaaataacatcctacccaaatgcagcatcctttccaagttttaattattacactaatacgatatgtcccacaatacacttcatcaagaactatctctaaaaacatcaatggcaaagaagaggacgatgctacagagaagaaagccatgaatcttatttactattgtctactaaaggctggtacctgcaaactatgagctgtgagttgaatccagccacccctgtttttggaaataaagttttattggaaaacaaccatgctcactcacttaggtattatctgtggctgttttcatgtgtttactgtcatcacagtggaaacccaacagtggaaataagtacttttgagagaccagttggcctgcaaaagtataaactatgtactctttgatcctttaaagaaaagatttgccaacccgtgatctaatgtaaagagctcagagcatgcaatgaacctttactgtttccgcaaagtagatcaaagtggggaaaacgtcacatcggactcgctctactttatgtgcaggagattgctatgtgactttctaaggacaggaaagagagacttttatatgctccttccttgtccttctgccccaggcagctactctcctacagtcagaaagggactgtaatatttccatactctccagagactgaaattggcaatggaaggagaaagagaggtaattgccctgctttcaatggctgggtgtcttgggagacccacagctgtcacatggaccacgcaccttcatcactgaagggccaaggaaagagaagtcttagcacagaacctcaaacctgctctgtaccatcactcccatacctttagccctgaaagccaagggaaagcataactgctcaaacactctggttaaactatgttccgggcttataaaattctatacaggttttgaatgttactgtagtgaaatggtaattaaaggtaatgagaagcctcctggggaaacagtaaaaatgacattttgtgaaccatcaggtatttctacaaccccaaagccctgcatttattaaaacaaaggcagttaggtctaaactccacttcccagcatgtctcatccccagttcaaggataaggaggactagggtgatggatgccccagtgtgccctggacgatggacagcaaactgattcaattcaccacccacctgatttggagagattctcccaaaagatctcccagccttgacgatccactgaaatgtcctggaggggaaaataacagtacatcccattttaaggaatccccaaaggtgtccagagagagatcagtgagtctgccttgacaatttctttgttcaaagcacaccttaaactatactgggcacacactgagattgctttcagcttttcagtagcgctacagctgatttccagtcgttacagacttgggagtttttcgtgatccctgtaaaaatagttcatcgttgccaatcatttccttgtcataaacaggtcttgccgattggtttaaaatgtaatatagggcttccctggtggctcagtagtaaaaaaaacatccacttgccagtgcagggaacgctcactggcccttgatcgatcctgatccgggaagatcccacgtgccgtagagcaactaagcccccgtgccacagctgttgagcctgtgctctggagcccaggaaccacaactactgagcccacaagtcgaaagcactggagcccacgcaccctgtaggccatgctacgcaacaggagaagcctccgcaatgagaagcccctgcaccgcaactagagcgtagcccgctcggccgcacctagagagacgcccgtgcagcagtgaggacagcggacagccaaaaataaataaattgtttaatgtggtgtatatatatatatatatatatatatatatatatatatatatgtaggaatattactcaaccagtcacagcaaaatggatggacccagagaatattatacttaccaaagtaagacaaagacaaatactataacactcatacatggaatcaaaaatataatatgaacaaatctatcttcaaaacagaattacagccataacaaacaaacttatggtcaccaaagaagagagggatggggagagggacaaattataatgggattaacagatacaaactagtatacacaagatagataagcaacaaggatttagcgtgggacagagggattagactcgctatcttctaagaacctaatgtggaatacagtcaggaaaatataatcagaatataatcaaaattccctggtggtccagggggtaggacttcctttcactgccggggcccaggttcactccctggttgggaaactaaaatcctgcaagccacacagcatgaaaagtgttgaaaagaaatcaagtgtacaacattttgacataaggat

SEQ ID NO: 64000 - DNA, 1498 bp, Bovine  19866880518192
  misc_feature (1)..(1): n is a, c, g, or t
nattccccacagttcataccaactaagtagaatttcaaggccccaaattctatccttaaagaggtattttacattaaaaaaagagagagaaaaatacacagtgttccttattcttcagacagctttcccagtcaaatctcctgttgcttattttcctttcctctgcactaatcatagagctgtttcccaaatgagaccaccccccaccccccacccaaaaaaaaaaaaaaaaaatcagtcatctagagatccttttatcaggtcacattccttggccttgcctcaatcttactgaacgaagaatctgggaaaactggcctcagcaatcagtattattttaaaaatttctctaagtctaacgaacaacaagatttaaaaaccactaagtactttgaatatgcattataaaccaatgtcttctggaatcaattattaaaaagttacattatggacatttctagagttcaggaagatcaaaacctctaaatgtcctgatgaaattaagaagttgggtttcttttcattcattaataaactatcaattttaaatacaaaaacagctctgctataaatactcttgtttatatgcgtgacatcaagcttaaccatctacacatcctttcgtcccccatgggtttcctgtttagttttttattagtaacagtatagttcagaacttaaaaaaaaaaacacaaacaaacaaaaggaaggttttaatgttaagaaaaacataagacaacagcaatacagcttagatcatatattaggcaagtaacacaacagctgtattattcagcattaccacatgtcagaaggctagtcacatgtgttcacaaaattgtaacagcctatataagaaaatcagtaaaaaaaaaaaaaggggggggggaaattctttggttttaaaataaaaaccactagattaataattttctctaaatgtgcacatgacaaccaggccaccatgaccaaaatattattgtctgacatgtaacaaaacatgccaagaaactgttgattattaaactcaaactgcaagaaaatattaatgctattcccaaaatacagcatagctcatcacaaaccagaatcacacaaaagacaagtcagttacaggtgttattcagtctcattatgccaattaaaatagtcaaagtttgttgtagtagttaaaatctaggttaaaagaaaaaacaggaagttttcacattaacgcataaaatagggctatgaaaatcagcactgtgctagaatgaaagaaaaagatgccttaatatgttaaaagtgaagttcctctttgcctaaagaggaaataactggtctaaatcagaggtcaacaacattggtcttgagcaatgctaggaaagtaagtcagtgaatgccacttgggagacacaaaagagaaaaaaaaacaggaaaggacacaaaaaattcactggagaagacagtgttaagaaaaagcaacagaattaattatagagccccttccatacaccaa

SEQ ID NO: 64001 - DNA, 1469 bp, Bovine  19866880554680
  misc_feature (1)..(1): n is a, c, g, or t
naagggaaatgtccggccccccccccgaatttatcagccctggagtcaacttgaaggtataatgactccatttgggatcatatcaggtctgaagcccagtggaaccaatgtatcatttcctttctactgacatggaaaaacgtaccagttatagttttttagtatagcagtagtagcatttgtggcctgatacatacaccaacatttttccctctgcccctaaaatattctgctccaagggcactggtagatctcgaggcctgggatttttgactgatctgatagcagaaaagtgcctatgaagtaacttgggtgagtcggaggttcaaacgcaaccctaaagacttgctgcgttctcctactcttcagactgaatcagtcccagacattattataatatcatttttcaaagctctataaatagatagattctcatttctcctcttaagcactgtttgctaaatgttttggccccaaagttcagtcatcccatgcaagcattaatcaatacaggagacattagtggtcactcattctgatgagatctgacattattcttcctctgcctatgaggaggggaggggaatgttgcttaataaagacgaaggtctttgcttcttttgtatgaaatgcaaatgatgaggacatgtgcgatatacatttcttgaatgtgaggctgctgctttttgttgagaaagagaggcaaggccctggaggatttcagaatttgtaaatataaaattatctgccttcgtgtttaaaaataataataaaagggagaaagagttggcaggttgccggattacttacattacagtaatagatttgctgacccttgacttctgctgtagagaaatgtattgaatttttcataatatcagatgaggcagatctaaaaccccagtatactgagcaccattatttaacttgagatttaacaaagccgaaatcttttcaaaccagcaatttcttgtatgatgataatttagtggctcagatgctaataaatcaaggttataatgccattgatttgttaattttaacttgggttgattgtaagtcatctttatttaaggaaaaaaaaaggagaaagaagaaaaaaatcttgcctttcacagcaactgaatttaataagaatctccatgatagcaaaaggctcccctactgtttctgctttggggtggaaaatgttgttctcgtattattcctagggaaaaataaaatctcatgctgctacaaatcttatgcctatggaaaaatgttattttttaatacatagtggcttacctttttcagatccattaatggcatcgtaaataagcattttgctaatctgaaatgtgaaatctgggtaatagtagaggcccatttatctgcctagctttcaatcctcagactacattagatcgggggcggggtggggtgggggccggggaatctctctggatttcctaatgaatatattgctt

SEQ ID NO: 64002 - DNA, 3821 bp, Bovine  19866880567423
  misc_feature (1)..(1): n is a, c, g, or t
ntataaagacttttctcctgaaatttcagttttgtgtgaaattactgattacaatttcccttgtcccattttctttttagtgtgtgaccaatttaggcagagttggtttatgtttcttgcaggtaaagaaacctaactcagtaatcgactcagagactgatagagatttatgatgattaaatctcctctcttcctttttccctccatcaaatagagttgtctcatgctgctttatcatttgctgaagtttcccttttgggtagaagcctgtaatcatcttctcttggactagagcattttggagatctacctgaggtggccagagaatagtcaggagaaatgacaaggtaaagaaatctgtagactaattcaattgtgggtcaatggtgtcctttcatacctggcaaagaggaaaactgagctgtgcaaatttctttctgtgaacgtggcaatatgagagatttggcatagttattctaccaaaactaaccagattaaagaaggacaatcaattaggccatgaaattaagtatatggttacaattttcttaagttgtatgaggggaaaagatagagtgcagatattagagcaaataaccaaagcattgtctcattctttcatgctcaggatatgaaaaaggtcagcaactttcagaaaggggcatatgacatgcttagtctctgactggcttctttgttagcattattactaaaaccaactgaaatcaaagaaaacactcactaatagtacaactgatcagcactgatagcattctgattaagtacttgccacatgaaattcactggacttctcagtccacttatggggataaaactcaagaatccttcctactttctccaaaagttcttggggttgggagcttggatttctctgactctgatagctttcttccattgatttttttttttaaattttaaataactgtctctgagatttttgtcatttacttgtcacaagtcagtgcttctttggtttattatgagaagactaaggacacaaaatacagtgtataagagatttgggcaaagttgagtatgtgtgcagaactgagccagtacacagaacagggaacattttacatttgcatttttgcaagataaatgtctttaatatggacacacagcatccatggtccattaaaagttttcagctattcttgttggctgttgttcttcttgctgccatggcctccaaacctccatcttgctagctttcttctctcctctctaccttgagcactttgctttcctgggcaatctgctaaaaatttgtgatttaatacttagaaccacctatgaatgacctctgttattaatgtcaggtaaataaatctgacctaaaataatttggggttaagaattagcagtgcatgttgaggctagggaaattctttggtctaacatgtcaacatctgatggagcagccagaagacttgtaccttcctgactcctaggtaagctggtagaacctaatatgtgtgtatgaggataagtacaaggagaaatggaagttatcaaaagtgtaaaaagaattttttaaagactttttgagtattttttaaagaaagtttgatttgtagatttatatatagaatgaactagttaggaaaataattcaaaatctagggacagatgccaagagatggaaagaaaactcttcctccttctccttcatgtttgtcttcatagaagagccatagcttgccaattccttttctttttaagactatacattcaacgtgtatcacattcttataagacaattagttctgatttgttgtgcgtgataagtcacttcagttatgcctgactctgtgcaaccctatggattacagcctgccaggcttctctgtccatgggattcttcagaccagaataatggagtgggttgtccttctccagggagttttgatttgggagacaactttgttatttatatgggatagaggggaagaatttcttctaccaaatttctcctatctaatgttaaatcgtatatttaattgaagtgaatattctgctcattcaaatttattctccaaatgagatagatgagagcttatttataataatgatgataataacaatggggactatttctcgcacttttatggtatggcaggcactttatgtaagtttcccagcaaatctgcaacagagattgttattacatctccatttttataactgaagaaaaggaaagggctacagaacagttacaagacatgctcaaggtcacatcaagcccatatgtggtcaaactgtaatttgtgtagtgaaggctggcattgcatggatttcattccttagatgctgctgggaggcttggaagcatgattctgcatgctcccatggttgattctcttggaatttggtatttgtatcatcagctagtgaggtggtcactatcaaacctttattttctgttttatagttaatgattccattttgaagaactgagataaaggagaaggataaaaaacttgtcacacgagaatataatcatagaaaactttttaaaaatttccttaaggatgaataataagcaatgcagaaatctgaggaacagatatgctgactgacttgctcaaggtcaaacagatagttacataaacacattttcctttgtcaaagaagttcagtgttttaagtagctaatttattttaatgttgggagatctctataaatcttactgcattacttagataaataattttccacgaaaattgtttttcagtaattttgtttggctattttaatgggtgtttttcataatctctaatgctgaatttctcatcaattcagccctccagattttattaggttttgtgtgcttgggaaataacaccatcaaaacagagttatcttcacatatgcaagacaattatattgatatatcatgtgctgtattttaatttcaaaattattgcctcattgttttttcctagagcccagttttatttctttcctcttatcgttaaaggtacagggacaagtaattcaccctttaaaaaagaacagaagagaaaaggtttgtttaaaaaaaaaaaaaagtagctagaaaaatctcccacagagtgaattcccacagtgttatggaggatgtaaatttagcccagtgtgattcaaacaatcaagttaggaattttaatttaatggtttgttcctctgaattgttagacgctcacctcattgtgcaagttgtgtttgaattggagaaaattaaactaaaatgtgttgaatttgccccaatcaggttattttgggaggtctgattcacaggctgagtgatggactagaaagaatgaatcaacaaacaaaagaaaaggaggcttaaattatttcactttaataatgactctattatctctcaatattttaaaatttaaatatttggtttttgtgatggcagtatcatttcagcagtttaaataggcttggggaattatcttattttcatttcaatacaacccagaatcccatgtttctggtatgttggtcagaaacctcaatggctcacagattaaagggtttgtgaatcagtttctgccgaactggcttggctgtggcaaataaaatgctggaggagaaaaatatgttggatgaaagaacagacgagaatgaaaatcaagttgttttttttttttttttttacgatattttagggaatagtccaataggccaaatggatctaaacaatcatggctcatgtttggaattacaattgtatgatttggttaaaaaaaaaaaaaaaacaacccagcactttactggaaagtaagaaaacacttttaaaaag

SEQ ID NO: 64003 - DNA, 1861 bp, Bovine  19866880598159
  misc_feature (1)..(1): n is a, c, g, or t
ntcaatttctaatccaaactatttaaataaatgtttaagtggaaataaatttttactctataaaatgtaaaattttaatgtcaagatcaactacctaaagaatccattgtgatcaaatctgaataatctgaaaaaatcactttattaataagaacagtagtacttagtgattcagagaaaaaattcttagacaagaattatatcccaatgatattatacttatcaaacacaaagattttttaaattcgcaaagttaacaaaaaatgttcaatgtcctggatctactggatggatgatttgactattatctaattattggttgggttaattactgtattgcttccctgatagttcagttggtaaagaatttgcctgcaatgcaggagacctgggtttgatccctgggttgcaaagattccctggagaagggaaaggctacccactccagtattctggcctggagaattccatgaactgtgtagtccatggggtcgcagagagtcagacatgaagagtgactttcacttcacttcacttaattactgtataaattttgtaaatgtataacttagttaaaaattcagtttctatttaatagaccttttctagaaaacctgaaataaaaaactaaatgctactgaataaagtccctacctgattttcaagtaatcaacaatagcactggcttgtttcacatcaaagatattccatttttcatttttgtgtgatggtcctatttcagccataacttctccaagccattttatgctgtcttctaaggacatatgcagtgctgaaaaaaaaatccatagaagtcttaagcattatttttatggatgttttggcaacaaaataaccaaagatgtccttaatgtgtaaaaatttcagtacttgtgaggacaaacggtaatactactgttgtttgtttatgctaataattacattttatgtaaaagaacagcaggtgacaaaccgaacaacagtaaattaccataaacactattcaaatgtctaaagagtttgtttccattttaagatgggaaaaaaccctcaaaaaattactttagaatggaaaggaaaatctttttatgatcttagatcaagagtatagatggaaatgacccaaaggttggttagattatgctggtaaggaaggcctacatggtagacttggccatggtagacagcaaaaccaaacccagagctgaaaatgtaaatgaacagagttagagttgactaatactcagttttagctgattgttaccatgtgggaatttgggcctgaagagtttcaaagacaccagaaatatggatttttatgtaaaacatcaagacttttcatttttcttttccaagctacagacatacatatgctgtttctcaaacgtatgcctgatggtggtggtgagagccagatgacagtgcaaaaacagtgacactggcaccactttgtcaccattacaccaaacaagtcaattatttcactattaaaagcaaacaaccaacaaagtaaaactatttcctaaggcattcagttgaaaaagaagtaggtaagtgtcaaaagcatgagacttaaacttttacaatgtgtatattacaaatattaactttcatcttttcatatttttacttgtggcaggcaaatacaaaatacacatacacagactgtcatggctccctgcgtgctgaggatgaatccaggtaactggagtgtctcggttgtcctttgctgataagtgaagggtgtatggacatgacaccaaagagcatgaagctggagatttgaaaggccgtctatggggttacacagagtcggacacgactgaagtgacagcagcagcagcacagaggaggttggatt

SEQ ID NO: 64004 - DNA, 1510 bp, Bovine  19866880610106
  misc_feature (1)..(1): n is a, c, g, or t
ngacatacagatccgcccatttgaagaattaaacttccctgggctagaggaaatgaggcggactaggatttttcacagagctctcagtacctcacttagcaagataggtagctggggttagctctacttttgggacaggtattattaaagcaaagggatattctttattatgtctccccaaccctcacccactaccctgactatttatttcctaaaggaaatagagtggcaaaacaggaaggcagggggacagtgcagaggagataaaagataaagccaggcttagattggaaggagaaattcatggagtggggaactgtacccttgacatcaatgactaatgaggtacactgccttttcagcatccaaggcaaagaggaaactggagtcagggttttccaaaacacctccatgatttttgtttccttgtttggtctcctaccacctgtaccactatttacttaacattttttccttaaatgaactcaaatttttactgaaataatgtttaaaggaaactttctatcacttgtaaatggaagtgtagtaggctacaaatgggaggtaattgcaaaaataaataagataaaatgaagctaacttactgagatctggtagagattaactattaccttccaaggctctgtgcctcagcttccctctttctgggaaaataaaaacatgctgctgctgctgctgctaagtgctgggaaagattgaaggcaggaggagaaggggacaacagaggatgagatggctggatggcatcactgactcaatggacatgagtttgagtaaattccaggagttggcgatggacagggaggcctggcgtgctgcagttcacggggtcgcaaagagtcggacccgactgagcaagtgaactgaactgagtcctgttactaccaagcaggaatactctcttgcccacattagtaaaattaaaaagtataactcaaagagaatatttcttggttaggtttattcaactgaaagtcaccccatagctttcttaaaattaggttgaaatttctaaagtatgtgattactgtcttcattaggtgagaaaaagatccaactgcttaaaagaagttcacttatttctggtaatatgattagggagatttcttttgttcctgtgggtctacactctcgcaaatcttagaggaaacccagtagtgatatcctggagctgtttcttatgtgcccttcagtgtaggctgatggcactgtgaccagcgactgtacaggagtgatgatgagagcacatagagcatacagtgggaggtagcagggtatggacacaggagccctagccctgagtcagctggctgtcagctaaccctaaccctaaccctaaagaaagtcagctggactcctggctcagccacttagttgcactgtaatctttgtgcctcagtttcctcacctgtaaatggggtatgaagcctctgactcatggggccattgtgggtatacaatagtaatacaggggtccccagactccagg

SEQ ID NO: 64005 - DNA, 1877 bp, Bovine  19866880622363
  misc_feature (1)..(1): n is a, c, g, or t
ntaggccagcaggtatcactgggggaagaaagaaaaaacaccacttttccatgattctcagtaagaatatgtgatacactataccattattggtgtggggagtgagtgagggatgtgaatgcattcacagattcatttgtaagcttattcacattgactgaacccatgaggacccgccattgggtgggaggccacactggggaaaggaagtggtattgagttatgtaaatgtcacaagacaaagggaacagtagctcacaggtggataacatttgacccttaaggaaggtctttcacatcatctcttgaatcctgcagcagttaggaagggccggtagtatttaccccattctagaaatgaagaaactgaggtttagagaggataagtgatttttccaacaatcttactgcttaatatcagagtgaagcttcacatacctacacgtgttctgacctcagggccttttccatatgtgggagcttcttgctccagcaaaagcaagtcaaaagcaaatgacagatgccaggcttagatgctgcagacatcagtctttcccagtgactctcttcaaaagccacggcatgaatgaattctcacccatcaaaatcttagaccaaaaatggacactccttccccatgccctgatccaagccaccaacccagttgctcatcttcactgggaacctcttccctggaagctcaacgtttatcagaaacagctgttttggttttcttttataaggtaccatttatttccctctaattttaaaagtattacaaatttgttgttttaaaaatggaaaatactccctccattcaaagatagaagtgaagaaccctgtgctataagtcatttggaatcatataatacaggtgtttccgtaacgaagtctacatacatgggggtcataatgctattctgtttcatagccttcttttttcactttatatatcatgaacacattcccaaccattaattttttttctttttttaactgaagtatagttgctttacaatgttatgttcgtttctgccatacagcaaagtgaatcaactaaatggttacatatatcccctctttttttgattttcttctcatttaggtcaccatagagcattgccaaccattaaatatttataaaaatattgtgtttttcgtctttggagtaagtttaatctactatatggaagcaccattgtttggtcagccattttcgtttcgatggcacagtctgacttcagttgttggcttttcctttcacctttgcttataaaggaacaggttcccatgccctcactgcttgtcctacatgtgacgtgcctccccatctctacttccatgcatctgaccagtcccttagacttgctgccttaacacctcccttcttgctctccgtcatttccccctttgggccaggctctcccacatctctatgctgtttactgcacttgactaatttattccaagttaataaggttccttgtgtgcttaatctcaaatgtgccctacattgtttctgagtcttatttcttgagattgacttcatctgatcatctactttaatcatttactgattgtttacatgctgtgcattttcacataaatgaactcatttgatcttcccacaagctagctgtggtagacagttgggattttactccttctagcattccctcttctttcatctcataaccttattccaatttttgtctgttgaaccaccactccttacaccaagaccaagtgatgtggctggagtaagaggtacatagcaatgctatgttagcattgctaacaagcacatagcaatgaatgggtatcttaccaagactaaagccaaagagcatctcagattccctgagccgtagcatttg

SEQ ID NO: 64006 - DNA, 2055 bp, Bovine  19866880629679
  misc_feature (1)..(1): n is a, c, g, or t
nactagaacttcagtgctgcacccgctgccaacagtgagagtatggtcttttgtattaaatactgaaatacactcacttaaaaacaaaaaatccaatgcagtatcctgcaacgatgctatgaagagtagcaatttgaatttccattatcaattaaaaaaactttctgggttataacactgtcaaataaagcagtttcttgggaatactttgtgaggctctttcatagggttctaaacccaacttaatttactacgattacacctataaaaacattgtaaatttcaccgaatggccatatgaaaagggactctgtaaagtgcagtgcagataaaaatacaattggactagaaatatgactaagagttggtgtgtgatgtgacattatctgaagatgcatttgtgtgatcaaagatgggtgttaagcatgtgggttgaagctgggacggtaactgatgatgtgaagagcagccatcaatgtggacttgtgttatacttttcaaaggagcaagtgatacggcccgtttgctcagctgtgtcttgacttcatcccatccatggccattatgaaaaacacacccagacacctctacttggacctcacaagctctgaatgtgaaaccaagaagctgagtctgtctggacttctgcagggatatgccagtgataaggatgttggtatgacctaaacaagtatggactgaaaacacagaccaatgataacacatgatttatcctaactggtcttcaattttgtggggcacacagtcctaatgcaaaggggaaaattcccatggatacaaccctcatagtacgctaatttggcattatttcttctttgcattattatcatcacctttctgaaagaagctgaaattattagaaaaccaaaatacacagagcttggcaagaaaggattccctgggtcaaaagcacagaagaaaaacaccaagatggggaaaaaagacaacaggtcttatctaggaacaattttcttattaaagaaatacttactgttcaatattagtactttgaacattaatacatttctatgctaatacagtcacatggcaactccacagtaataccgcagacctgtttgccagaagctgaaagttctcatagtgaatgaacctacggagcacacagaatatactgaataatccatgcttgtggttgggggggagtatcagtattgtcagacagggttataggataaaaccaaactaggagaacatctaattctattagcgcctgtaaccagagaaagccaggtcccctaaaaaccacacggcggtgtgcaaagtaaaacgccagggatgcttcccgtttcctcaaaggtcttacgcttgacgcgttcactctgaattcacacactgttcgtgaagcgccgacttcccacgcacgggcgtcttacctctcgtaatgcctgcgggtgcacgtggcggcgctggtgctcccagggttaccgcccaactcatcgtaaatatgcttccactggcggcgggctgttatctgaaaaagtggcaatgagaaattcagtcttgcaccgtaagagattcgcagtgccaggattcaatacatatgcaacagtcagaagagaacaacagtctgtcctggcaacccagaaacagagaagtccaaatgggtctgtggggagactcctgggcttccgggaagatctcacttttagcacttcgctttacagtgagaatggaattccgctttgggctctgtatcttgtcacccttacagcatttttatccaagatatctccctgggtattcatgtagttatttgcccccaagatcccaaatgcatactctgttcctttatgtaatgtgattaaagcatcaaaatacagatttcagctaaaatatgtcttagtatatccatttaaatgaatcagaattaacactggttacttgagggatatggtaatgggtggctgagtacacaggtaaacacagaatttccataaaacatacttctgtatcttctgatttttgaactactgggatgtgttacctaaattactatacaaattaattaaaatg

SEQ ID NO: 64007 - DNA, 1836 bp, Bovine  19866880648809
  misc_feature (1)..(1): n is a, c, g, or t
ncattcccttatcccaatacagaatatgcccaacattaatactttaatgccaaactgctttcattttggtcagctattttttctaaatttaccttcctaaagataatttttctccacagaaattttcgtttgtttgtttattcacagcccttagccagtatgccagttctccctaaatatacagcaggaacaccatacttattttcctttatttgttatatacttacttgttgactaatatgtttgcaggtcttgctacatgctagacactactctgagctcttaaagaactatactcattgttttattttcagttcacttcttccaaaaataaaatattatttaccttacaaagttgtcatttcaacatgacataatgtttttcacaaaatgattgtgtcatgacatttagcaatttagctctgcagtggattatatttatttcaattcaccattagtctaaaaataagattccattttcctcttccccaaaatggtatgtattattgttttcttattgaaaaagtaacatttgttcattttagaaatgtataacaatagaaataagtaaatggaagaaaattaaccataatatcacctaataccctgcatagcttttctctctgcatacaataaggattctaatcttcaaattatatgcataaatctgaagatagataatatttaaatgaagcaaaaataatgttccaaattactctgaggtgaactgcgatttattttgtatttcagttctcagtatttcctactctacaaaggcagagtggaattgtcaggatatactagacccaagtttcaaaatctcatgttaaactgcctcaagggtcctcaaaatttctggagcactttttaataaaacgtttattttcaaggaaattaaaaaactaggtcaagatatcctttcatgcacccctaaatcctatctaacaacttaaggactgtcctccttacatgtagactggtttcttgaagtgggccttaacatccagggtttgcatctgggctgctcaggaggcctccctgttagcacagagagagagggcaaccgataggatggcctctagctaccatctgtctctctgccacccctcagaatgcaccgagtgctcctgcagaacacacagcccccagatgcctaggaagcctcttatctgcacctcccacctagagccctttgcctgtgtctgcccatgagaggaaggagttgaggggaggaggagaggccacaaccaaatggccataagctggtgagaatgccccacaaatggagatctgaatacgaaatgtgtatgtttcaataggtaccaagaccacgtgatgggtttgttttgtccatgatctttagcggggaggtggctcaaacggtcaaaaactgcttggaatgcaggagacgcgggttcaatccccaggtcaggaagatccccttggagaagggaatgacaacccgctccagttttcttgcctggagaatctcatggacagaagaacctggtaggctatagtccatagggttgcaaagagacgcaactgagcaagaaaacaacagactaataatgagaacaaaaaagacaggatttcaaataagtcaggaatacctattgtaatggaatttttaagcgtttgaaaaatgcccacatttaggttttataaaaaggagaatacttgtgaaggtgaatactagcactcttaattagagcttttgtgattttgttgttgctgacttttgttttttaatttttttttttttaagtttatttggctgtgctgagtcttaattgtggcatgtgaggtcttccatcttcattgaggccatgtgaa

SEQ ID NO: 64008 - DNA, 1279 bp, Bovine  19866880652620
  misc_feature (1)..(1): n is a, c, g, or t
naagccttgaacaagcagcgtttgtgtttggattcagttttaccttagtcatgcctctttccagatacaagaaacatttaattccagatttcctgcttctggcttcaggcctttgaccagcaaagtgaaatgtattttttattgctgccgtccagccagctgctgagttgagtgaagggaagaaaaaaaaaaaaaagaaagggaaaagaaatgaaatagaaatgttgccctgcctcttcaacttgcaacactgtataaggaaattaaaatctccctagcacccatctagaaagctgggttggctcaggactctcaggacccgtgggagtgtggcgactcttggtgcagcggccacgttattctgttggtctctgcttcctctcctctccttccccaccctcaggtaatgctgacgggagcccctcatggtgtcaccatctcaattagggagtggagctggaggggagagggtggtaccaacaaacaataaccattgaaatacccaggcttcaatgctccttgggttcccatggcaaccaaacaaaagtaaaacaaacctatctgtcctaacaataaaaatgtgttttcattaaagtcaatttaacatattcttcctaatttaaaatattcaatgcattttgctcctggacaaaaatccccaacctgccactattgaagggaatgaagtcgctggcagaactatgcagataaaagcaattaggggaatgttggggacttcacagatgagacggaatacattcaagtatgaacaggattgcttttttctctcttctgcttagttatgctttttattatataaacattaactgtaatattacagtgggaagcaggtatttggcagccacatattattttagtaagtctgcacagagagaacagtttccagttttagcagctgtaacatgtttaaactcagtttgtaatgggatctgaagataactattccccatgggctgtgttgatcttcatggctggcccactgccagatgcagggctcgaaactattattcacgccttcttgcacataccttgtccgagcatgctcagtaaatgaattttctgtctactgtgctgtaaattgggatttgactttcccataatttacttggtattttattaaagactgaaatattacgatcacaaatatccccacatttgtactcacaaacctgaacagttgtgtatgtttaagtagttaagatccaaattgcatagttagaaaccaatatcagaatagctaacaaatattcaaaccaaa

SEQ ID NO: 64009 - DNA, 1321 bp, Bovine  19866880664140
  misc_feature (1)..(1): n is a, c, g, or t
ngatctttcctcttcgccttagggctagtgacaaaaggttgagtttgctgctgtataaaactcactccttaaacctgagtgacttacaactatatggattaattaatattagttattggttgtgatgctgcttcctgatgtctattctgggattcaggtgatagagaagcacaaactagctttaaaagcttcttcccatctctttcatgacatttcagctcacatcttattggctcatgtaagtcatgaccaagtataacttcaatgaaatgggcaagtataagccttcttaggtagaggcagaaatgggtgaacagtagtaacagaatctgtcaaaggtatcaataatgtcttccctgctgttgactgttgcagaaggatatggcaactcactccagtactcttgccaagagaattctgtggacagaggagtctggtgggctactgtccattggggttgcacagagtcagacacgactgaagtgacttggcatgcatgcatgtgttggagaaggaaatggcaacccactccagtattcttgcctggagaatcccagggacagaggagcctggtgggctgccttctatgggatcacacagagtcggacacgactgaagcgactttgctgcaggagcagcagcagcagcagcagcacctgttgactgtatgtggtgctcaccaggctgcagggattctcatcccaatataaacatacagatgatatatagaaatgatcttcaagttttttgaaatgttgtctgtttcatgcccagaattctgatactgtggtgttcactgaatcttttatcactatttctgaaactcaatgaaaattagtttttcttttaagaattataattacattgttttatacttcattagtaatttgaccttaattttatgctcaactacgtgaagtactcatcagtcatctctcatccagtgactctgccatttctatagtttttatttggatgattatctgtattagctggtactgagaaatatatttttcaaaaatggtacttgtaaacctgggacatatgcttcttcaaatgttgtctgtttgtgcttatttcatattgtcttgacatctgaatactaatttgagtatgtaatctctacagtcaaatctctccacccccccccacagtaaataccttttattaaatgcaattctaatacaaatgacatatggctatataagatacactaaatgacaaatcttcagttattataggcttcctttgcctgatattccgagtcaaatctcttctcctaaacttcattgacgttatttcttattccttcacatctaaa

SEQ ID NO: 64010 - DNA, 1485 bp, Bovine  19866880665360
  misc_feature (1)..(1): n is a, c, g, or t
nactgggtcatgggatacccagatagttggtcgaacattattcttagatgtgtctgtgaggatgtttttggatgagattcacatttgaatcagtagactgagtaaagcagactgcacccaatctcttgtgggcgagcctcattcaatcagttgaagccctgactagaacaaaagtctgagtaagaggaaactcttgcctgactaattgagctgtcacgtgggtcttttctagcctttggacttggactgaaaccactggctcttcctgagtcttaagcctgcagatttttggactgaaactcagaccgttggttgtcctggttcttgggcctttggactgatgctggaactaaaggtcagttctcctgggtctccatcttgctgactacagatcttggggtttttcagcctccgcaaattgtgagatatatatatatctatatatctatatatatatctcctattggttctgtttctttgaagagccctaatacatggattaaacttaaacatgtgtcagatctgtaaccaataatattgtgaatagcacaaaaaaggaaggaaatttttgaaagctatataattcatcaaagaagttgctcatgtcattgatgaaagactgaaattcttggctacgtcttttatcttcacttttattttactcctcaacttaagtgaaagttccaacattcaagttggaactacactcatttgttaatccaattgtaggttacctatggatacaagaggtcagcaaagagttaacaaaaagcatcctctgagaagagattggctctgtggcatttacagtgaagagcgtggcatattttattattatttgtacatttgtgctacacttcctgtgtatcagcaaaatatacaatgaatttatatgccaacacacacacacacacacacacatatatatatataattttattggatgtatgccatatgtatatatctgtatctacatctagatatataaaaactaacacagacatacctcttttggtttgggaagctagttaaatatttagaagtccatgtctgtctaaagctggtcttcagcctgactcacaactcaaacttctagagtgagggttggcaaactgtagcctactacctgtttttgtacaacccatgaactaagaatgtgttttacactttcaaatggttggaaaaaaccactagaagcgtattttgtgacaaatgaaaattatataaaattcagatctcagtgtccgtaaataaactttgttggaactcagccacgcttattcatttatgtattgtctatggcgtctatcacgctaaaatggcagagctgagtagttacaacagagaccgtatggccctcaaatcctaaaatatttcctctcttgtcttttgcagcagaaattgcctgttctagaataggtaggtacatgccttgactggcagcagtaggatgtaaccaaatgaccttttgaattcttttcatgt

SEQ ID NO: 64011 - DNA, 2967 bp, Bovine  19866880713405
  misc_feature (1)..(1): n is a, c, g, or t
ntttaaggctgagtcttgtattaatcccacagtgagtcattaatcataccaaatgcattataaaaactttaatcattgaagttgaaactgagattgtaatgcaatccatcccttttaattacatcagctatttttccctttcagatcaagcactatgtcgcaaagggaaaacagattaaaactagagctgtttgatgtttctctttttagagcaattttatgtactttgttttaaaagttatataattaaaatgcttgaatttttcagccctctggtttttgtggcttgaatgttctgtcttctttctctctggggccctctttaactcggtaccccaaaacagagctcctggtcctggagcccccttcccacctcagggctctggctaagacagccgcctctccactgggctgtgtttgccttgtgtgacctctttatcttaagcgtctggtctacattttgacatgaatgaaaacaaactttggatagggtaactcaggcaaattagtttatcttttttgggccttagttgcctcatctgttgaaacaggaataacaacagtaatactaatactccacagggacattgcacattgtggatattacatgaaataacctgtataacgtatctaggccattaccttgcagaatgtaaccctcaggggctctgactattactgttttgttcactgctgtatcttggtttccagaacactgcctgacacatagtcggtgctcaataaagagctgtgggcacaatggtaatgaatggcagcttttgttatagttgctgttattgtgatgttgctattggaatttggccaggttccatggacagtgataatgatgtgatttttggatgtgtccacttgtatccttggtgtacagatttgcaaaatgaggaagaggtcttttaaagaagtatataagttaccaggtgctggttttgaccgggaaagatgaaggcacttgataaattgcttgtactgagaaaaaacatgcacccccacagcatcgacattgctactggcattgccagcctggctgatcctctcttctgatgctctttcaggttaatcctgccgtatgaaaggtttattaaaggagaggaagataagcccctgcctccaatcaaacctcgaaaacaggagaacaattcacaggaaaacgagaataagacaaaagtatcaggagccaaacgcatcaaacatgaaatctctaagagcaagaaagaaaaagagaatgccccaaagccccaggatgcatcagaggtgagttgtgctcctctacagaagtctgtctgggaggtggggcctgcctcggggtctcctggaaccttgcactcaaagcctcatccctgcccaagacaacaccaggctgtgaaccctaaccatctgaacttcacaggtcccccaggagtgggccttctggggcagtgcgagtgttgaatgggataggccaggaataggatctggaaggaagcaaaaacatggtgtagaaagctgagtgcagaggccgacttcaagacagaaggagtcagagcttctgctctgaaagccaagggactctgatgtgaaaaatgtgccctttcacagccagtctgtctgaggagtgggtgactttaaaacactcacccgtgggatccgccgtgtctctgcagaactgtttgggaaacttagaggcttgtttgcctcttgtaactgacctctgtgcaacagccttgggttgagaccaatttagaaacatcttaagtacatattatttataggggaattttgaagtggttcctctgaaaccatgattatctctcttgttaacaggtagtttctgaaccttttaaaataagtcccagctacccacagcccccagcagccctttggtagaagccattactgtcagtgtccagccagtcatgggggctgatctgggctctgtttcaacatgaataataaaaaactctgctgcccatttaaaaaaaaaaaacaacaaaacttagcagccacatttggagacagcatgttctgagattcaacccctgagggaattttggtcctgatattaaacaccccctaaaaatcaggtttataatgaacacataagagactccctaattaaacattggcctaaaacacacaacacacacctcaatctcctaactagaaattaacttacccaactgacccctgtgtaagaagatattaataccaagaagagaaatttgtttttttctttcataattattttaaactctaataattaaaagggaggaaaggaaatgaggcagaggtttctaaacatctgcaagcttgcaatataaatggccaaaagcaaggaaattccaagttaaggctgacattccattcttccttgatcttgttggcttgctgatttattacagggcttgggatcagtgagttctattagataccatatgcacagcattgccaaagcacaagaggacaaactgaggacccagaggccaggtgacctttgaatggctccactctgggcatgaagatttgtgagttgagggaggaatcctcagccatgccctgagcccatcagctggggaaagaccattgtcaagagtcaagcctgatgccctgtgggccacagaaaccctgaaagccttaagactccctgtttcctataggccccaacaggttctctcaggaactatgcagtatctaagtgaccaaggtcattatgatcagggtacctaaactacttggaatcccacaccctctccaaggttgacccaacggtaagaattgcgcctctcatctcctacacagactcctgttattgagcgagtatatttcttttcattgactgatgttttggagtttgaattttattgtttttattgtcattgtttttttaatttttgatgttttcaatgtgaagcagtgaactcagtggaataaaaagcacttctagtcaaacccactatcttcaagtaatcg

SEQ ID NO: 64012 - DNA, 1258 bp, Bovine  19866880715697
  misc_feature (1)..(1): n is a, c, g, or t
natccaaaaccccaactgagtaaatcattgtaagtctatgcaaaaaagctgaattcaggtggtgttttcacattttagtgtacatgaactatctgggaacttgtcagagatataataaattcctgggccactgccttagagattctgaatcagaggttcttaaggttctctgccttcctgcattctcctgtgtgattctgatatgggcagtcccagaacattcttagagatgctgtctccagaatgaatggacatcgttcatagcatgtatttccatgacttgggatcagaggaaatttgctttttttttcttccaatagaaagaaaaggactcaaggtttgtttagtgttttatagactgtgtgaagaaatagagacaaatgtttcaaggatgagggaattaaaaaaaaaaaaaaaagtcatttctaagcacagagtatagccagggactgatttcatccagaagagataattaagaacctagagatggcatcctcatggagaatgaaggaaggaagtgaagtggtcccaagagtccaggtgacatcttctgctataaagccgactctgaaacatgcatttttcccccattgttcaaccttagaagtatgactttctccatttcaagaacgtgtaaagacactagtacagagctgccccccaccaccacacacacacaccactcccatcacagaagtgagaccaacaggcactgttatggtatttactgtgtaccagagatggtgttaggggctgagcatgctgaaataaatcctgggggttcctggttatactccctgactgtcatcttggatgatcttggacaaatcttggtcatcttggacaaatagagtgcaataatgtaattgacacattagaggctgcttcttcaaatagtactcagacactctggaattctgacgatgtttttgtaaatattttcactaacactttttttcactttatagaaagcacaaatttgagccagtgtcttgggctactgtagaaatctcaagtgggcatgccttgggatatgtatcagcatcttcaaattatttttcattggggacttggcttcagtgtaaacgtatttccatttaattaagtgtgccagctgatgaagtggctacccacaaacaaggcaggagtctaagcaacataaactgttaaaagatgtcatcttgaaagcagctaaacatctccattcggaagaagcctccagcctgaggaactaagtaacataattagaaatacatct

SEQ ID NO: 64013 - DNA, 702 bp, Bovine  19866880733401
  misc_feature (1)..(1): n is a, c, g, or t
ngcttgttaatgagctcttgtggcagtgaacggggatcatgggtttgtcacatgaatatatgtgtatgtataaaactcaaaaagatagaagagttgttgctgccatgtggttgtgagaaacccaaaaacaattaaaaccttcctagagaccacatttgcacgaatcagtgcaaatcctacaagttttcaattctttaataactgctaatagtgaaatatagttattgaaaattatttttagctccacatgttacaccgctttaagaacttagactaaatactgtcagcctgtgtttgctttcctagcatgttattcatttattgagaaattcagaatgtaaaacatctgggaataagttggtgtgtgcacagtcatctttaaaatgtgtatatttcaggacttcttttgtgtatttatttagaaatatgggaaaattctgtaaacatgttctggaatatatgtagcatttgaatatgaaagagagagttggcataactgaaaacccaaatttcattttctataaatattactctgttggaggagtgggtttctgaaattagagaattcagattatggttagcaatatttacagggaagtagtatctctccctctttgccctggagtgaatgtgtgaaccagaaatgtccattctggccccttctggggtgtgatatgatgtttatgtctaaataaagaagtt

SEQ ID NO: 64014 - DNA, 1381 bp, Bovine  19866880773192
  misc_feature (1)..(1): n is a, c, g, or t
naaacctgcactgaggtcccagagacatggttcctgccctcacgaagtttccacaaagtagtgggagatcactcatccatggttgtaactcaaggcacaatgtagcaagtactatcaagaggagtaggcagtattctgaagcacaagaaaaaggtcactgaggtgatttgagctggcctggaaggaaggccagatggaattatcagctggcagggatgaaggagaaataccctcccgggcaagacactggttgggaaagcacctccatctatggttttatttttcatatgaaaaaatatgtagtgagcacccctcaaactgtagtgctggagaagactctaggagagtcccttggactgcaagaagatcaaaccagtcaatcctaaaggaaatcagtcctgaatattcattgaaaggactgatgctgaagctatagctccaatactttggccacctgttgcaggagccaactcattggaaaagaccctgatactgggaaagattgagggcagcaggaaaagggggagacagaggatgagatgattgaaaggcatcaccgcctcagtggacgtgagtttgagcaaactccaggagacaggaaagcctggtgtgctacagtctgtggtgtcggaaagagtcggactcgactgagtgactgaatgacagcaacgctgtgtgctaggcactggacgtactttgtgcaagccgagtactccagtatggcggaagtactcaagatctgtaaggcaggaatttggatttgaagccttcccaatgggcactgtcgtgtaaaagaagggagtgggtctggcagacatcactgaggtgcccccaacatgctttgtgactgatttaatatcagggacaagggagagttaagtactgaggacaacctccaggttttgagtccggcaaccaaaaagctggtgataccatcaagagataaatggaggaggagccggtttggagaagataaataagtagaaataaatgaacaagccgcagcctgtctgattccagtaagcactaagtgtgtaatccaaatattcctctacatcatgacataaaaatactgaatctgaggctctgtataggctggcgactgtgagtcttgtataaatagagaaaaaaaccacttgaaatttagtaacataggatagaacatctgtaactggactagagatgacctagttcaaccccctaattttacaaataaagaaaccacatctcagacatactctctactgaatggcagagccaacctaggactcccactacacatttaatggtgggatagcgggggtggaatccaaatttctaaaacattcaaatcggaataaaggtaccacctaaatttttcagagggaaggacagggaagcc

SEQ ID NO: 64015 - DNA, 1686 bp, Bovine  19866880780941
  misc_feature (1)..(1): n is a, c, g, or t
ncctatttcccccaacccctgcccaatcagttatctggacaataagttatcacacacatatgtggacagctcagttcagaatcccattttgagggtctgtttcctgaggccactcctgttaccgattactatacagtccaggttttgtgacaaaaaggcacactgaagcttggtaattgaggagggcttaaaaaggtggttatttaccaaaaaggaggctgatttaggggaaagcaagaaggatggtttggcacactgttctcatcccagcatcaacctgggaggagagggagcagtttccagaatacagagagaagagttatgtagacaagacaggaactctggccttctgtaaaggccacactcaatatccagtgaccccacagggaggggagctgagagtaaaaacacacagcctctcccttcaaccacccacgtccacacagtggcctacctagaagtcagaaggtaagaagctattgataatttccaaaaacattggttttctgagacacagagaaggatagaaaagggcagaaagtggatctggagaagccaacagaaaacatcaagcaacaggccaaatatttaatgtaggattgtttatggtatttaaaatatatttaggaaatagctatgttcaattataattatttttatctagataactgattatgttgaataggtgactgcactcattttatgaaaatggcataattaaatattcagaactttagccagagtttatcttaagtaacatctcaagttttgaaaaatttacatttatatcagagttatgctcatttacatttaatcacattacttcaaaacattcaatatttaacaaaaataatgaagtactttcacttttcttttctcaattttgactgtaccttaatatacagtactgtacttaatgtccattttcataaactacataagccaaaggcacatatttggttaatgatatttatgaaataaaaaaagaacatcatggtgcttctgggtagaaagcataaagaatttaaaaggactgtaaaagtgataactaatttaaaataactgttataatattatttctattatctttttttttagtgtgtgtttggaaggtactatagttaaactgtgtcctactttgtttctgtttaattgcttgaacatctgtaggtaaccaatgttatgacatcctgcttaatttaaaagtggcctaaactgtctcatttaaggctttctttggtgatcctaggaattaaatcaaagcctctgcagaggaagtttgggacagtctttaagcatgcggacattagtcctcaggtttcatggttaaaaacttgcctccctcctttggttatgaaaattgttgatttaaagtttgtacacagttcctggtgtatactaaatgttcaactagcttaacttcccttctccctaaacgtttgcccagttaacatctattattccaggtatccaccccaaaaagataactaggctcagagaagccttctctgacccactaatcttcagattagaaagcactctctaatctcctttacaataatctgtagttttcctttacagtacttggcttgtaattatatgcctgtgtgtgcatgcgttctgttatgtatgactctttgcgactggatggactatagcctcccagggttctctgtccatgggatt

SEQ ID NO: 64016 - DNA, 1639 bp, Bovine  19866880804913
  misc_feature (1)..(1): n is a, c, g, or t
ncactttcttggaaagtagaaaacacttttaaaaagcccatcaagggaaaagggacttgattataagcttttttacatgtctacccataaagaaagaaatgttaatagagtgagccctttaaaagtaaaatggagttcttacctttcagagattttaaaagttagacctgatggggaccttagggccacatgcattgttcaattgcatttcgaagatgttgagactatagctcagacatagcatgtgtcatgccaggggtcacagtggtactggctgagttagagaaggtatttcctttcttttcatattattatgttttcctggtttcctcttgggagcacttacatctcaaataattgtcattgcctttgagtccttttccttgaatttaatgttggtgttagtttacagcacgtgcctccgccctttggagtaatcatagccattgccatacattatggtggctcaattattccagccacaagcactgataatacagtagctcaggatcttttcaccaccatggtaaaaagacttatccctctgtaggcagacccagctcctttactgtggtaactgagccagaagtgtgcttcctcaaagttggagggaagacactgacaagggttagaaaaagcatatggtgctacataccacattgcaagcctttgtgaaaggcacgtctcacaagtggatgaaatatgttgatgtaaaacaattaggtcacgtggaacaaagcaaacatttgaatggagatgggatatcagtacagttcactgtactgattttaccaagagccccagaaggcaggaaacctgttctactgaagagctaaatggcttcaagtctcttgacttctccaaggatgtgtcttcatctgtaaatacagggtttggattaggttattactaaagttgctttgtgttttagcaaactccttaatatacaggtggccctgttagcatgttggaagcacaggaagaattaataaaattatatagactgatcatttgtttgatcctggttgcaatatttctctcagttaagattaacttcatttgtatggtttccctttgagctttagtcccttacaaaaatctgaatgcttttcagtttaatgtgtattaacaacctatttgttcagtgtttaaaatagtaattttgggaaatactttccagaatcctcaaacaagtaatccttaagcaccaacggagtgcaggtactcttggtactcaaaccacagagtttggttggagtcctcaaggggcgcttacactgctgctgaagacagtagagttggaattgagggcacatttaattaaatgacaaatgagtgacctagagaataagtacagtttgtagcctgtttttatctaatcacttaattttcctatattgagaatttctgatctttaaactctctttatcatggtttcaacaaatctattaagagttgactcatagcagtgaataactgtctctttgttttcttgagataattctcagattaaaaaaaaaaaatccttggcatttgagtccagtgatgaaggctgtgggaaagaaataatcccaataattatatctaaagaaatatatgttatatatagcgattttttcttggctaggttaacactgtt

SEQ ID NO: 64017 - DNA, 1651 bp, Bovine  19866880825267
  misc_feature (1)..(1): n is a, c, g, or t
nctccatcaaaaacatgaaggtacagcttttactctgctctacctgaaagggtaagaaaagtaggttagcatgtagggagtggaattaagtccatgccagcaagtgttcaagaagtaaaccttatatagctcatgacttacatcagcaaaaccctcctctccactctgtgctttcagaaaaggggcacacgaattctggaacatcataccctaataattttttaaagactgctgcaaactactgcttttaaacattgaaatattaagaattattctgcacccaaaacagatcatcttattttagaaagtgctttttcactaactatcacaacattcttttgcaaggagctggctaaaagagagtcaagttttttttttttttttttttttgcattgcaagtctgtctcctctgttctagttcaagccaataactcattttatgcagtcacagaccaagaattttgaaatttcgaaggcatcactggaaatagcatattctccatgatcctaaagacacatttcttgataacacattgattactatatccctaaatgggtatttctggtacattgtctgtctagcaggcatatattcccacctatttgtctgggtaatttctggctccagaagaacatatgggccatattcacaacttctaaccattttcagtgtttatctttattccatcaaatttcttcagagttttttttttctatttcccttctgtctctttatctcttcatttttcttgaatgtgctgactagtaatttgtttttgtaaagctccagttttaaagttggtgggataggcaagctcagaaatccacaggcagaagttttctttcttgctctgtcattatttaacgtttacaatttgtataagtcatttagcgcactcctgctttctattccccgtttagcaaatgcaatgagggccgtttccttctatcaacttagctaaaatatagtggcaatgaataatgcacatgaattactttgagagtctttggaaaaatctgagttcttgaccctactctgccaatagtctatttgatgcctgtgcaagtcactttgattattctttgctttggtttctgcatctgaacaatatgagtcatactttcttcctctacctatttcacagagatgtctgtatctcagaaggcaactgtgatactttgaaaagacaaacagtactaagaatttagggcagtatggcctagcttctggaatagaaataacaatagtagtgagtaataacagttatcaatgacctacctgtgccttgcattaattacatgatctcataatcttttaactgtcagtgcaacgtgggtatgctgtgctgtgtgctcagccgcttcagtcatgctcaactctttgtgacgctatggactttagccagctcggctctgtccataggattctccaggcaagaatactggagtggattgccatgccctcctctaggggattttctcgacccagggattgaacttgggtctcctgcattgcaggtggattctttactgctgagccaccagggaagcccattgtgggtatacttatttttacatgtacatcaggaaactaagatttggtgtgtgactaatttatggtcaacaaattagtaagaggcaaaaccagaa

SEQ ID NO: 64018 - DNA, 1674 bp, Bovine  19866880853539
  misc_feature (1)..(1): n is a, c, g, or t
natgcttattgctcttgttgtgaatggaatacatcctgaactctgaagggtttgggtgggctttaccggacaagtctgaatgggaaacctgggagccatccttcatctccttagagagcattttcattttgctgtccaacaaaagtttactgaacctttatggggctgacccccaggctaagcaatgtggaatactgacaaacacacaaaatggataaaatgcacagtttcatctaaaaattcttaggtctgggacagcaatggaaatgccaccaccaccctcccaccctcaccctttcagagctcatttggatggtaatacattgtgtcctggagaacaatcagaaaaccaaaatgacttggtaaatttgcttgattttaaaaatataatctcagggaggggaaatagtctgtctatgagacaaatggttaccaatcttaaaatagttcttgctttatttttacccagccaacaaacattctcttttagagtcttaacctaatttcccagagctgcctggcctatctttctcctctaattttaatgttctactcaagtctttaaggtctcagttggttaatgtttaatgcgttccacaaccagtgtttgatgtttatactttattgggctaaccaaatttgtagagcaaattaaaagtgtgcaggtctttggcaagccacattgagatatgtgttgctcagaaaccatctccttgttctatactgcatgccccaaatagtttcaattaactgttctctgttcttggcaatatatgcagttttctgcattgcttttggggagcaattaacttcctagatttataaacatcataccctcataccctttcagaaagcaagtcacagccgagagtaccacttctgtgtgaagtgagagtgtcagcaacaggtaacctattaagccagattgacccaagaccataaaaaagtgcacttgagagggagtgggggaagctgggaggggaagatggggggcagggcgagggaggagggagtaagaattgaagagctgatatttttgttcaagcagaaacacacacataatttgaagaaatcatacaaatataatcacacacagattaggtagagccattactacaatcacctgaagaaatatattatttctcttactcatgggtttaatttcagtctcttattttgaactaactgagcagcgtggtgtcatacaatggacagggtgggggaaaccgaagcttggaatctccagcctgctagctcaggtctcctgttgcaatgttgcccttaacctcgctggacatcaactacaccagaagagcactggctatgatcacttggagtggcttccacttcaggtatttttgggatgtgatcccatctttagtctcgtttttagtcataaaatgcctggggaatgggatatggggcttacactaatcctttatttttaaggttttttttttttttttgatgtggaccattttttagactctttattgaatttgttacaatattgctttggttttagattttggctttttggtcaccaggcagggattgaacctccattcctggcattggaaagtgaagtcttaaccactggaccaccagggaagcccctacaccaatcttcttaaaggacacaagtttcacaaataattgccccaaagatgacaa

SEQ ID NO: 64019 - DNA, 1502 bp, Bovine  19866880904212
  misc_feature (1)..(1): n is a, c, g, or t
ncatggagtagaataagcaggtttattgattgtaaaaaaaagaaaagaaaaagagccaaagattaattctctatgcttaagaggtcttcataaacttcataaattatagccatcaaaatgtcttttaaaaccatttccagagtgactctttaaagagcctaaaacaaagcactagtatcttaagttaatattctattgatattacagataatcgtattaagaaagatttaaatctgtgtatattgaatagttatcaaaaaatgcaaacatgagttatttcagattcttaagaaagcagatacagtgagcagtgagacaacacatttgttctaagtgtaatagttgtgatgcagctttttttcctcaacatccagcatgagctttccttttaactgacgagccgggggtttggaattggctggtggatatctgacatctggggaaatgaatagcaggagaaatgagttgcaaggtagctgtgaaagtcacatttgagccactgtggtatttgagagtccagttgttagttttgctgggttcgtgacttcatgaccagactttgcagctgggggaggaagcgggaccccctgtgtgcagtctgagcacctagacggcactgcctcctttagatcttaaggaccaagctaggccctcaggtacccactctgccccgatgtctctttacaaaatatttggaattccagtctttccacaggctcctgataccatggtctatagactccattacccccaaaagatgaataaccatttgcagggcagctatgagctgctgcctccatccccttacaggtcctgaaggggctttttcatctgagatggtccccctggcggaatctgtgggccgccagacagaccaaagtttgagaggtctgcaactgatttcagtcaccttcccttcttaagaattctctccatagtcaattctctgaagacccaaatctctcctcactctccacctcaatttagctcctagatattccccatcaaagtgatggtgaaaagcgactataatccctttcttctttgcccagtgcctatcatagacctccagaatatttctacattcctttagaattccctacatcattttgaaataacatatagataacatttggccatttaaatcctgtcttccccctcaaggcacagaggggaaataaagatagagatctgcccatcactggtggtaaaacctgactgaaaaagagttttgctcttgcattaatggcaagaacgcacggagtcacatggtttcagaccaattagcaatacagatgagctagcaagtcaagttccatttataggctgggggaagggggagaagtaaaataatctgtgttgttaagtgtttctgagaaatgaagacctccagggcagagagaaggcggatcaggaaatagctatgcaaatcacatgcctatgaaattactaaaactttgatcagaggcattaacaattgctccagcattcacaagtatgaa

SEQ ID NO: 64020 - DNA, 1551 bp, Bovine  19866880953341
  misc_feature (1)..(1): n is a, c, g, or t
ntttttcttaattattcttgtcatttcacccataacactagtgttttttttttttttttttcccatccataacactagttgtctcgatggaagggaaaaaaaatagcttcttgacagactttcctttctacttttccaagtagctcatagaatgatcaatgaagtatccagaattaattaagaaaaatacacttctcagtgatagcattaaaaaaattctctctaaatccaagtgtgtgatcatggatgtgcagtggtggttgtctttgtgtgtgggtgtgtttgtgtgcacttcaaatgtatgttagctctgcagttgttttttttaaatcagtctgtttttttcttaatgagtttgtgaaataatcattggctacacttacattttcaagtacaacacctttcctctcttatgtacttttttctttctttacctcagattctcagcttctggttggattaaaaatcacacatagttcatataaagaaatttacatgcaaaatgaaagaataaggagggggaaatgccatttattttaggtctattgttaacttttctataaatctaaattggcctctagagtgatgtaaaatgtatatgttgatgggtagatatgttaatttattattatcattttggggggattgttacagtgcttaacagacatgactgaaaagtaactgaattacctacattagcaaaatggtattttagatgaagaggctctgaacaagtaataaaatcatagaatgaatgctttgaccaagatcatacatgctttcattggttgttggtttgttttataattgtttcatgatttaagaaatggaccccagagatcaattcataaattctatagctctccacaatgaacttagagcatctacagcctcatagacttgtgggaaaatgggacatgtatagttgattctttcctcatattaactgaaaatggtttctatctcaaggctatattctgatttttgaaaatgtttatgctttactacagaaacttcacatctttgctcataatctcttagatacactgaagccatcttaaatgttgcctactgtgatattttctgacacattgcttttttacaaatacttcttagtattgcagtagccaatttggaggattgtcacagaataccagcagaaaagaaaacttcaatcaaactctgttgtcagctgaacataccaacagagcagacgatctcattgcgacggtgagagctttctcattgtatgttaagggatctaacaaatcaccttttcatttggtgagaataccactttctatacttttcagctcattcttccctagggaaattcaccaattgtttggctcagaaagtcacaagaaaattgtattttgcactattattgaatatatttaacaagcctaatgggcatatatatcttatatgcattaataaatatatttaacttgcagtattaaggaacctttaacacttggatcagacgacctatgtacaaagagagatacagacaattctgaaggaatgatataatgaaaagattgggat

SEQ ID NO: 64021 - DNA, 977 bp, Bovine  19866880954145
  misc_feature (1)..(1): n is a, c, g, or t
nattatttttaagggaagacgtatgtgcatagaaattttatattctgtattctgatgtatttaaaaatttctttctggggacttccctgacagtcccgtggttaagagtctgcacttccaatccaaggggtggaggttcaatgcttggttgggaaactaatatcccacatgccatgtggtacagcccccccaattttttttattaaaaataatgcacaatgtctgcccctttttactgtcaagagacaaaagggcatttgcttagaaagatttccagaagttgttatgagtttactttgaagtgttcacactgtcccacctagttgtttctgtgatcagaaatgtggatttatgaaacagcccactaggctccagggtgggcctttgcagaagagaaaagatttagcacttgaagagtgtaactcacctgggagaagatcgcacctttgatcgaggcttcattgtctccctactttaaaagggtgtccataccagtcaaaagcagtggttctgaggactaaaatgttgaactgtaagcttttttgcttcgcatgcacatattccaactgaacttgcttgaaaacacttgctttaaatttcatcaaaatgaggcgatctttctaatctaaactccttcagatggcctgttaatgagcgacttgcaaatactaaaattattgatagtggcttttagaaatcctctaaactctagaatttggtctctctccaactgtaaagtggcactgtgacagctgccatactccacagaactggaaagctgaatcagaaaatagacaccacaaagccttggtaagttcagagggctaaacaactcttgttggtaagttgttgttcatttgctaagtcatgtccagctctttgcgaccccatggactgtagcaccccaggctttccctgtctttcactatctcccagaggttgctcaaattcatgtccatttgaatcaatgataccat

SEQ ID NO: 64022 - DNA, 829 bp, Bovine  19866881013282
  misc_feature (1)..(1): n is a, c, g, or t
nctgtcattctcactgaatttctaatccaattaatagatgttaattttaatacggtttaatgggacactgccaattagtctcaggcacaaaacggggtattttgtgtttaatacgaaagcaaatatagcaacagtaaatcttgatttttgaacactgtaatttcaggaaggttgcctacattttttaacattaaccggaaattctgagagctcaaaaaataacattctgctagaagacaaaaatcagttgataaggaacaggactaaacaaaatcaactggctttgtgtgtttctgctacacccaggaaaaataaaaatacaggcacacctcattttattgtgctttgctttactgagattcatagatactgtgtttttctttacaaattgaaggttggtagcaaccttgcgtgaagcaagtttgccagtaccatttctccaacagcatttgctcactttgtgtcacatatttcaaattttcttattattattgttctgtgatcattaatcttgcatgttacttctaagattcactgaagactcagatatagctggctatttttaacaataaagcattgtttaattaagctttgttcattgttttttaagacataatgcgcacttaatagactatggcctattgtaagtatacttttaaatgcactgggaaaccagaaaattcacgtgactctgtatttcagtggtatggaaatgaacgtccatctccaaggtatgcgtatacaaacaaaccacagatgaagggtttggtatttctttgagggctatcaatagtaatattttcagactcaaattcagagggcagtccat

SEQ ID NO: 64023 - DNA, 1345 bp, Bovine  19866881031910
  misc_feature (1)..(1): n is a, c, g, or t
ncccacttcccttctcagcaatgggatgaattattaataatatgctgagggtgtacagctctgccaagatttacttcctatttctacttgggctggtttagtattattttccaatgttctgaaattacatgtcagaatttatttgaaaacataataatttggaaacggatatcttgctaattggatcatctgtctctagctacagctcttttcttctctttgtaacatcctgatttataatgatcatctcacctttgcagatattgcagtatttaggaataatgctcaaccccattctgtctctggaataacataaagtcatcttggattatgctattattctactacctaagaattatctctatgcttccttcctgatcgtgttggtttgttgccaaagcggtgatttatgtttgcttgcttctagactatattatgcaatgctttcatatacagactgattagactctacacagaaaggaacacagttcagttaatcaagtatgttacataccaatccttgtttccttaggcttcctcatggcttcctttctgagatgggatatggaattcacaccaccaatgtaaaaaccctgaccattctcactgatgactttcaagcttacagagcttctgtttctagaattaaaatacttcttgtatctggcatagcaaaagagctgctgctattttgataactgaaaggtttaacagttgtacacaccagaactgattttggttttactcttgtcatttaaatgtacataatttgtacatacaaccttatccttatagagttgggcccttcagactgactggaatcaaggaaatatagtcctgcagaaggaaggggcttctcacattgtctaacatttctctgcaggcagccaacccttaactagcatccctgaccaatagctattcagcatccccatggtcaccttcaatgataaggggttcagtattggagacatagctgatcccactgttgagtattactagttgatgattccttcttgttttcaataggcaccaaagcttcatgtgcagtaatctctaccctgtagcctagttttttctttttttctagagcacttactatggactggatgtttgtatccctcaaaagtcacatgttgaaactctaatcccaaatgtgatgctattttgaggtggggtctttgcgggggtaattgggtcctgaggatggagccttcatgatgagattagtgcccttataaagagagacagaagcaattttgcttcctctctcactaccaaatgaagatacaaagagatggtcttttggaaccaggaagagggtcttcaccaagaaccccaccat

SEQ ID NO: 64024 - DNA, 1768 bp, Bovine  19866881037891
  misc_feature (1)..(1): n is a, c, g, or t
ncctgtctaaagaatattaatgtcaaagctgtctctatgtttatacaaaagaagttttgtcacagtagattggttcgttcgagttactatagcttttaggatatgaagagacttttaatttccttactacttactactttcaggggtatgggaataagctctggtgacttgaatcgctttttttttttccacatccagttctataacatgggtatcatccacaataacaattcatttccccaaatgcttttatagtataaaggtttgcacagttaattgatatacaggtcaaattcccattacaacaaatagcacgcaaccaaaaactctctttttaataaaaaaaaaaaaaaagagagatgtttgggccctgggcagtacctctctaattttcacactacaaaagaaattggacctttagcagtaatggatctgactcattttgacactgagaattacaatgaatgcccagattgtgaattgggcagggtgggcagagttggaagtagaaaaaagtgagagacaaaaaagtattggaattgcatttaaagaaataaaaaatggcagaataaaggaaggtacagaaattcttagtctattcatgtaggaaatcttggttatgataataatcatatcatacattttcatatagttctttatttcaaactattttcagatacttttctcattttctcattcatatacccagcaactccttaagttagacatggtatgtagatttctatgttagagaataggaacctgaaattcagcaaggttaagtaatcttcccaaggccacacagctaatcaatagcagttctagggtttagaacctgggtcttaaaccctagttcattaaatcacactgcctttttcaataatgtgttttatgttttacaggaatttacatcaaaatcatctgaatgtttcatgatggaaaaggataatttaatttgctttcacattttccatttactctacaccctaaacattctaacctatgacttggcattcaaaaaacatcctgacctatttcatgacaacatttctcttagatgatcaattctgtaccttcacttctgaatctgactgggtctacacgaatggaaagaaaatgtttgtgacaacaattatgaccttaacttttcagatcagatcagatcagtcgctcagtcatgtccgactctttgcgaccccatgaatcgcagcacgccaggcctccctgtccatcaccaactcccggagttcacccagagtcacgtccatcgagtcagtgatggcatccagccatctcatcctctgtcgtccccttctcctcctgcccccaatccctcccagcaaatctatttatgaattggcacaattaaagcaatggaaatattctggtcttgaagatgtctggtttgaaccaaaggaatgcttttaatgcttttcagacataggccatgaaaaagtgactttttggcaccccgatcatccatgtaactcacttatatgatgctgattgtaaacagtattaccataaaaccaatataagtcaggttaggtcttaggagtttgttctgtgcaaaccaatacaactgccacttgaaataaagttgcatcaatttataacaaacagaattctaagaatgaacagggacctcgggtctttataccataatatgagctacaaagccatttgccatcatgttatcttatgctgcagtacagatgactatttttaaaaaataacaaggtgtctatggatttttagtgataagaat

SEQ ID NO: 64025 - DNA, 1282 bp, Bovine  19866881170665
  misc_feature (1)..(1): n is a, c, g, or t
ncctaatatcttattccccggttgactttaaaattatatcagtcatgaaaattttttcactgtcttctgttgtgagtcattgggctatatttaattttaatcattaaaatgtaaaaataataaaagccaccaaatagtctatagtcaattttctgataaagcaaatttgttttttctcccatttgtgatttaaatggcctccagaaagttttttggaactaagtgttaattaaaaatatggaaatggatttaaagtacattacagcgcacagtggaagaataatcacaagagacttgttcacaataccatacccatttctcaatgtgttttttaactatctaggttattggttgtttttctgcatgcctgttcctagaaaaaaaaacctgtgattccagtgaaaacagtaattacaattacaacaaataggataaattgctatttgaacaggaacatgcagttttagccaccaaaagcaaactgatgctcctagactttcctgtttacacagatgaatttaagcatgttctcagattactttataaactgaatgctttttatatcttgccatctttaaaaacaaatttagtcctccgtgccttactttcgttagcttattctgaaacaatgccctacggtgctgtgaggaaccagtgaacaaattctctttctgaaattccctgagaagttatattttcagatatttaaatagtgtgcatatatcatttacttttctgaatctctagtttctcattataaattcaagagaaagatcatgaactagagagaaagattttaggggatccataaagaagcagaggggtttcacttgcccgtaaggattgggtatatggactttggagtcaaatagatctgggttcaagttctgagggaattccacatactctagctgtgtgaccttgatcaagttacttaacctctttgaactttaggttcttcccccaaaattgagatcagtaaaacctctcctcacatcatggtatgaattgaagggcctaatatttgtaatatgctttctataatgtcatttctaatgcctagcttagagcaagtttccctataaatgagagcagccttttttcatcatcagtgttcagcttcctggtcatggcgagcactggcaaaactccagtgggtaccattcaaattgttttgggggttgggggctgccaatggacaacccgtggaaagcaatgtgaatcatgccccccagagttaggcaacagaaaatctagtaatttttgatgtcactcccatccg

SEQ ID NO: 64026 - DNA, 734 bp, Bovine  19866881305950
  misc_feature (1)..(1): n is a, c, g, or t
naaaaataaagttttaaaaatatcaacacgtttggtttcaaaaacattaaaagaagaataaagaaagaacgctacctgtgtgtggctgcttctcaaatacccagatattaactctgaatgtctgtaaactctaacacttttctcattgacattcttctagtcaatgaagtagatagtacaactaagacagtacatttttcccgtgggactcaataaagctatttttattttgaatggaaaataaatacagcccataaattttgtttatttttttctgagtaatcctttccatttctcaaattctgtgattctgtattttgttatgtctttccccacccagaacaaaatactctaaaatgagctattctacaaatatcatatttgtagaaaataataaaattgaaattgcctaaaaatactctaaatgcttttgaatatggttacattctgacatcataggaaccctgtgaaatagttattataatcctgctttacggtgagagaccagtaagagctggaactcagtgcggtctaattagaaataccaagcttttcccaccatacctcttggcctcctcaaagtgtttcccgaactatggacagttacatgattttagggtggaagtcagcactaaggagttgaatattccttctttattgactgttggtaaataagttcatcaaggaacttattttgggtttagaactctctcaggtttatcaataattatttt

SEQ ID NO: 64027 - DNA, 834 bp, Bovine  19866881357629
  misc_feature (1)..(1): n is a, c, g, or t
ntgagggccatccattgggcaaaaaatactatcaagctaccccatatttcactttgatgtgcttaaagtcagaggtcatttaaaaaactaattgtaaactacaagacccatatgtttccttttccctactagccctaaaacaataaactaagataacaaatggaattttgcaggctttagttagaagcctttatcttccaaagagacttgagaaggaagatataactgacctttccatgtaagaacgcatatcaactactgagatttgtctttcctgttggcacctccctacaaaagaagtgagacgttaaaatcagctccaacttgtccaaattaaaagtaaccttcaggctaatgggttttcaacaccactccttaccaggcaaaaaaaaaaaaaaaaaaatgtgccccataaaattaaattacctcctcgaaactgacttctctaataaattacaagattaaatacagtaaaattgaaattactacaaaacaatccccgccctgcccccaccagaggtaaccctcctgtcattggtagaatttcagttcagttcagttcagtttagtcgctcagtcatgtccgactctttgtgacaccatgaattgcagcacgccaggcctccctgtccatcaccaactcccggagttcactcaaactcatgtccatcaagttggtgatgccatccagccatctcagtctgtcgcccccttttcctcctgcccccaatccctcccagcatcagggtcttttccaatgagtcaactcttcgcatgaggtggccaaagtactggagtttcagcttcagcatcagtccttccaagaacacccag

SEQ ID NO: 64028 - DNA, 652 bp, Bovine  19866881370769
  misc_feature (1)..(1): n is a, c, g, or t
naatgattctcataattaaagagtattcgccacatatacagctcttaaaattatgatgccctttgtgatatatagttttggtataaaaaagtaagcagttgctgacaggttttcgtgtttgctgtggctatgatagcatttagcctctggcagtgatattctgtggactaacattgctacctgcacaattccaaaaatattttcatattagctgaacatttgtagccctggaaatgtcctccttttttcatgatggattataacattatgtatagagaaaccagtggcaggggcatggtaaaactggggtctttgtttaggtgatttaaaatagtcaacaagcatatgaggaatagttcatacacataaacgttagtaagtaattagaaatgtagaattgtaatgcctatgacctaatttaaggtcatcagggtaactatattttaagaaacattttaatttatatagaagaaatttaaaaaatcaaatactgattttggtccaaatataccttcattgttatttatttatttatagctgtaattataacagctagttttgaaaggtctaccctgcttgccttatctgatgagatattgtttcactttcacagttaagagaaactatttctgaaaagatcacattggtgcca

SEQ ID NO: 64029 - DNA, 2059 bp, Bovine  19866881376940
  misc_feature (1)..(1): n is a, c, g, or t
nagggtgaactaaagggaaccttactgagttttaacataggaaaattcttcctgaagcacagttgggtagaaatcttgtttgccataaattcagcatgattttccataaaaagagtattatttttgacataaagcaaaggtcagagtttgggtgtgtgtttatgcccatgaacacgatgatgtgtgtaggtgttttagtttccaaagtcagggtcatgaggcaggttagggctacacaatgtcatggcaactaagcaagctgttcatttcagtccaaaaagtagttcaattcactagaaaacactcagtcaacaaagtttaaattaaaacacttacaaattatttgtgaaaagtagcctatttgtttaaagaaaggtataaaaatagcatagttttccaaaaggagattattatttaaacatgaaacaaaggtcagagtttggatgtgtatgagtgtgcatatgtgtgtgcatgtgttttaatttccaaagtggcagtcagaagtcagattagtactacatcaagtcaaaccatccaatccagttagtcactgcagttcagaaagtagacagtttactgggaaaagttaaaaaaaagtaagttttaaacaaaatatttaccaattcattgtgaaaagctcctggaagtttatctaatgaaaattattaatacaggtgttatttcatgagctttaacagcttgtctctatgtcatggaaataaatttgattaatctgatgagatacatttctcacagaaaatgttaatttctacccaatgcctgtatcttctgggtgcttagaaattgatttccagttcataataaaacttccagcaaaactgctaaatgaaaaactttcatcagttacttttcatttcataaatatgctttgaaaacacgttgttaattttacagaaaatcattaggctaaataaattaccttttggatacacttactaatggagtaaaataactccaatatataatttacttctaaatgcctcagagtttcaggaagtgttaataaagccctgacttcctgtatcttaaaccaaagattaagtctgatcattgctttcctgggtcttagtaaaacaaattttgaaagttataatggactttttggaaagggaatgacatataggcatatttacaaaattcctttctttgatttccaacttaaattaagaaaggttaggcctaaacagaaaaactataatgccactgaacaactgttacacagtactatttagactgtactcaaaggatagttgagaaaggataccgagagccagacttaaactctctagtttatgaagacagaacagagttgcaggtgacatatgatagaaaatctaaagattcacactttcttattgttagctttgaaaagccagaaaatactcagcataggttctggtcttcttctggtaagcaaaattggcagtagatgggaaacagcttctccaagctacaggcagttatctctgatgtgtgcttttaaccaaaggtggcgctgctgctgctgcaaagttacttcagtcgtgtccgactctgtgcgaccccatagatggcagcccaccaggctcccccgtccctgggattctccaggcaagaacactggagtgggttgccatttccttctccagcgcatgaaagtgaaaagtgaaagtgaagttgctcagttgtgtccgacttttagggaccccatggactgcagcccaccaggcttctccgtccatgggattttccaggcaggagtactggagtggggtgccatatcttgaggtaaactttaagctgtagggtatgagatccttcctttcatgtttttctctacatttttttttaactcctgaactggaggatgcttctctgtgttgggagtttatcctgttttgtgatttggtccctagcctgtcaggctcctctgtccatgggattttccaggcaagaatactggagtgggttgccatttccttctccattttaaaaggtggatctgtaattaacaataacatttaaaaaatcagaaagaaggaacaggaggaggagggag

SEQ ID NO: 64030 - DNA, 932 bp, Bovine  19866881412342
  misc_feature (1)..(1): n is a, c, g, or t
ntatatatatatatattcatatttgttgctttatctcatacagtagaaagcttagattccagcccagattttatgattctattcaacacgtatagattgaggtaacacttatcatcataaatcacattaaatgaagtaggattgattcatggttggcatcaattttttccatattactactttccatgaacactgctgataccaacataccacacaaacacaccgcaatcataaccataaactaaataactccatactcagaatagatggctgttagaaaatactcacactaattgataatgacatcatgctgctatgcacattacaatgtaaatgaggcttccagactcatttatggctcttttattcaaagtttagtacttattagtttttttttcagggtttagaaggttcttcttaaggctgtgggattacttattcctgctaattttgccccttggaattggaccaggagtaccaatttttgactgtattttaaaacagatgcttagcagcaatgaaacagaattgaaatgtctaatggaaaccacattagtgaaagaaaacaagcaaagagaaaaactgattaacagatttactcaggcagccatttggctttatgaaaaacgtgaatcactctttgcatcaaaatataacagcttccgtgcttttgtctaggtatgtgtgaagagagcatccaaatgaacacttttctttggtgatatattttgaaaagtggtttaagatccatcttaaacacatctgtaaacttaagtgacttctcaggctcatatgaaagatctaggaatatgatacagaactctgaacttcccctagtgtttataaaacttagccagatttagcaaaacctggaaagaaaacaatgcttgatataatgcccaacttttctttggcttctattagtgatgatt

SEQ ID NO: 64031 - DNA, 932 bp, Bovine  19866881421310
  misc_feature (1)..(1): n is a, c, g, or t
natgaacttactcaacaatttgtgatggagaagcttttactttccagtgagtcaaaatcactcataatctattttctcttattcagtttgcaaatgacttaccttatgcccagctcatgctggcagcaggaaagaatagtaagtaaaattaaaaaattagctctttttctcagtttcttctccttcctccactctctcactcttgaaatctggtgtcaaagcttaaaatctgctttggcatcttagttaaggaagttaatgaaataacatcttcatcagggccatttagttactttgagtcaatgattaccagatttgaattttacaaaggagacatttcaggtttggcaaaatgttcggatactaacatctatgcatgactaccctccaaaacagtgaataaaagtctagattgtactgaaactttgaatcatgattttttgcttcttattttagcttcagatgttaatcttattctgcctgctttttaacacacatttgtatggacctatctgtaatcgtaacattgaactgttgactaaactaacattgcccaagggaaagataatgcaagtcatatgtgaattaaaatttcccagtaaccacattttaaaggataaaaagaaacaggtagagttaattttaataacatttaatgtaatgcagtatatccaaaatattttaatatataatcagtataacatgttagtaagggctattttgtgttgttttgtatattcttggaaactcagtgtgtattttatacttgcagcacatctcaattcagactagatgtcttgggtgctcaagagccctatgtggatagtggttgccatattggacaaagcaactctaaacagccctagaaacattttagctttcactgaaatacgtgggataacttctaacattttccgtgtgttctccatgtt

SEQ ID NO: 64032 - DNA, 1648 bp, Bovine  19866881488271
  misc_feature (1)..(1): n is a, c, g, or t
ntatgttaccacaaacatttcctttaatctgaaaaatgtgttttttgaaaagccactcagcgcaaataaagctctaagtaaagcttctttttctaaattggtttaaattagctatattttttggagccttgaaaaaaatgagagatacagcattgagtttcgtcagttttttatatatatatatatgtatatattcttctctttctgaagagaagaaaggaagtcaggccaacagtgatttaaatgactttaaaaccaatctttcctctttctgtcttttgtttttagtggtttattggctgttggagccccttctagtgtgtaaatgaatttgtgcaaaggcactgatttagtgtatttgtgatttgtgtaaaggcgctatgcatttactgtgaaaatttaagtgagcttctatggttatagcataaagctaataacgcaatccacgtattttagccatgctttaattaaaggtgactatcttaaactgactgaattccaagtgtctgggcttattttaacttaatggctctatgtctaagcaataatctaattttaaactttttgtttattctaagtaaagtcaaacaatatgtgtatttgttaagaataatcttgggcaacacttgagatgatgtattccattagaaatgatttgggaaatctcttttgaataacctatctaaactgtctctccttatgatctgtagaaaaaagggataaaattaaatatttcttctattcaaaattaactgctgaacgttaaatattttccacatctatctactttggatttattaaagtaagtttcgaaagtgaggcctccctcttccaaattcttagagcattttaaccataaaaggcttaaaaatattttgcaatcccatgggcagtaatctgatattcagggattcttttttaagggaataaatggagtataaataagcttttaaaattagaactttatgtgtgatccaccatagaaaacattgtttcagtgcttatcatgtgccaggtacttgagatataaaaatggaaacagaaagcaaaataaaatttatgtagtactcccctactccttattttcccaatatttaagcattttctcctttgtttcttatagcactcctataagaataagaggtgttctctcagttttaaagattaaggacccaaaagactgttctatattgtaattagcctccaattaaaataaatttaaattaaataagtaagtaaataaagatgagggacccacagctcagtagagttatgtaatttgtccatggttctaaaggcagcagatggagactaaattttaacacaggtagagaaatggaaagaaaggcaaataataaaccgaccacttctgtttcattattaaaagaacacactcattcattcattcacttacaaagctggtgtctcatgtgtttttgtctatatgagcactggggatataaaatgagatcagtactcaagtcatactttcaagtcctgaatatggaatgaacatacctccatcaatatattcggcctactcagcctctactgtctcatcttttgtttcatcctcttttgtcttatacctttaaagtcaactcaaccattttcttcattgttgcatcccttttcccccaaccccgcc

SEQ ID NO: 64033 - DNA, 976 bp, Bovine  19866881665547
  misc_feature (1)..(1): n is a, c, g, or t
ntctcaggaaacattacttggtatacacaatggcataaatcacatgttcgtgtttactattctgagccggtgctgactaaagttcctaataccattcttgggcacgtctctatatctaagaaaagaatttcaataagctcatctaatgattacattagctctctgcaaaccaaaaattagcactagataagtattgctgacttactctcaacacaacaggaacataaagaaatacactattattctattaatgtgccttagctctttgaacccagagccgaatcaatatttatatagactgagttgggacgctttctaagttcatcattgttttaagctgcctatttctgtcatttgggttttgtttctccaactgtgtagtaacagcatactcaatcacagattcctctaagtcaaaggagatcatctggtcatatatcagccagctcatgtgtgtggctggcctctccaagtgttgtacaaattgagaaattttacacaaagtccccagacttctaactcctcttataaaataaaataaagtgatatgtgaaaaaaaaaaaaaaaaacaacaaccagaaaacccctctcaaaacaggaaagttgaaagtgagtagggttgctttctttagatgtaaggcaagccctgtagtttgccactgacccccccaccactccctgtcacctcaaattcagcccaccgttcccgtacctgcccggccccttggacaggaacccatcatttaaacttccaagccctaattcatcccacctcctccacggcaatgatgagaacagtaagactcagtgacatgtcctactgccagcttcaggtggaagttggacaagaatccaagtttcctatctgccaacacagcattcatcctggactctggagccagactgcctgggttcaaatccctgccctgtaatttactcccctgggaacactaggcaactttaactttcttggctt

SEQ ID NO: 64034 - DNA, 1135 bp, Bovine  19866881752973
  misc_feature (1)..(1): n is a, c, g, or t
nttaatactaatttttcgtttttgcctcagctctaacacggctcaacacagagctgatcttagttcatttattttcatcttgaagaaagcctttcagagtgtggaaatggtagactactctatgttctctaaggctatgaaacccctcttaggcatctttggtgaactgtgctatatatttctttagtgaacattttttaagaatcttttaagacatatcagtgatggatacaaagatgccccccaaagataaaattctaaaagaaagacgttatgttcaaatgtgaaaagtttagctgacattagagaaaaaattcacagaaaagattatctgacaaaaaatagcagcttacaattttaatgcttctggaactaacagctaaaatccaccaggtggtgaaataaaatgagttacagtgcagtttagctcacatattctcctagtcagagatgtaattttacagagaaagtgataattacatatttacatttttattagcctattcatgaattttccattgtatctttaatttttacaaatgagaatgtatgtattgaaagattaaagatatttaaccaccttacatcctttctagtgcacggcagtgtgtaaacaaacagaagaaaagctctcatttaaaataggtccaggaattcaatttaaaacaaaacaaaaaaccagaggcaaaccctcctacaaaatgattatcttaatctatcaagttttagtagaagaacgaggcacctggtattagactccttagctagaattattattgtatgaaagattaagattatactcttttttaaagttcttatgtgacctattttctcctattaagaaaatttttcaagtctgagacaattgatctgaatggctatatatctttcatgtatatctttattcatttttaataatgataacaattgtgtttgcattaaaacatatcaaaatgatgttttaacatgaatctaattttaggtttaaatgtcttgctgttaagtcacagaattcatcagtatattaaaggcatcatggtatctccaaatctacgtctggcttttcatcatggtccatcatctaacaatgtcatcacaggatgaagatgaattcagacacaggttgattaacaac

SEQ ID NO: 64035 - DNA, 755 bp, Bovine  19866881820271
  misc_feature (1)..(1): n is a, c, g, or t
ntatgcagatgatgaggcataattgttctttcccccacaaatacatttgtttatgattttgattttctaagtactcagaaaagcacatcataaagtacttctgtcttaatgctccttttaaaatccctagtaacagcttcatgtgctccatagaaacagaccatgtaatttattcaggaaaattaaaaccagtaatctggtattctgtgtaaagacttttccccccgtgcatgtgcttaaaaaacattaaaagaaaaagaaaacaaatctgcatgtgaaaacagcctttaaaatgaattactacgccagaaaatcaagctaagagaactctgttaaggtaactattttcctttcttgttgccttactgataaaagaaactgatttggggcatcttaaataaagagttggacaagaaagaaaatgttccgcctagaagtgtcttgcactggaggaggtgggtatttttctttgcactgtaatctgcagtaacttttatctataaatcctgaacaagaagtgtctagaataaccacacttcataagctttgctgagttgagatatctacacagcaagtctttcgatggggaaacattaatgctttttatattagtgatcatctgtaacacgagcaattaagtgcaatactaatggactgtggccaggaacctgttactaatattaaaaactgacagagatgaataggtttggaagcaaaaccaggctgacaaagacatttttatgaagtgcttggac

SEQ ID NO: 64036 - DNA, 789 bp, Bovine  19866881926144
  misc_feature (1)..(1): n is a, c, g, or t
ntagaaaaactggtttctgtttttaaaaaaatgaataaacaacagcctttgaaaaatctctatttaaaaattcttaaatttgcctctaaatgcaagttgtaattattagaagttggagtttacactgttgagtgtaaaaacaccctcaggcacaaactaatcaagtgtgtatgtcatgctacgaactacagcaagttctttgtttgacccaaaaaaggcttgccaaacagcagttttttctttgtcaagttcctttattgtctcctttttatttcttgctactccccccacccaaccccctttgaacctcactgtagtatttaagaaactttgcagattccaggttttattgatagttttcatcaagcatgaatttaaatttgagaatagattaggtgtcttagccctttttctttttgataaataacaagaggtttctacttatgattttctgtcctcggggctttatcattaagattaaataactgtattctcaagcatgccactgcacaaacatcttttcaattatgtgagtaacagatgccttcacaaaggcactattgaaaattcagaaagcatgtttccaaaaaagaaaggggaaaaaaagtatcagatgacagaagaatgtaattgtttaccattaaaatatatccttaactcttccactgaaaacctcttggaacattttgttttcgtacaagttattacaaagttggatcaaaatgatacatgtttgggagactgttgaacacttcagaagtctggaacctgtggtatctcacttacatg

SEQ ID NO: 64037 - DNA, 1581 bp, Bovine  19866881993414
  misc_feature (1)..(1): n is a, c, g, or t
ngcctaaaatacttggtacagtatgcaccattacacacagtaaggttaacaaactactgacgacccactaaattaataagatataacaaaaccacagccatttgcaattaaaaaacaagactagcagcaatttaaaaagcacaatcaaccaactcaagacaacatggataatacactgacaacaaaggatccttctcgacacttgtgggaattccatccaagtgaatgtgagcttgtgctggagcttgcagtgttgccaagcattgtgtgggagccagaattgttagcagagtaatgaattagcagcctcaataaacttataatgtactaaattgaatttatgaagactaaaatttagtgacccctgatgcccacacattaaatcacgatcagttttcatccattgaaatggcaactgatcgatgaatttcattggtcacagtttaataatcactgttccaagatgtctggtcaaccagttgcccaacttttttctattttgaccttctattttgatagatcttctggcagatacttccatacttgagagcccaggcattaggcatctgcttcctatgcattttcaaaaaagtctttagggatctactgctcacctctgagaacacacctgtcagccaggtgctgagagagaagtgccttgtgtggggctcgcatggttcgtcctgacccagtggttagcatcacatttcctaaggctgaaagaatgccagccccttcatggaccatagaacagaatgaccaacttgctccataggtacagggcgaaggaaggaaagggtgcttcagaccttggtggagaaatgctttttggattcctagatgcaacagccaggctaaaatcctttgtgtgacttttcctcagggctctttctggaccactattcaggtaattttgcaggcttccccattccctctcccctactcttacacccctgcaccccttcttgatcccaagcagaggtgaagggtaatggctgacttggtttctgttccaataaacactgaaaaactgaagacgtcattttctaagattccagtttgatcattctcagtctgaatcctcctggtacagctgcctgtgttttttctcagcatatatattactacttaggatactctgtgttacgtgtggagtcatgtcccccagaacaaaaatattgaagtcctaactccctgggacctcaggttgtgatcttatttggagatagggacttcacacaggcgatcagattaaatgaggtcactaggataggatccagtccactatgattgatgtaattttacaaggggaaatttatacccagagacagacatgtacagagggaagaccatcgaagacacggggagggcattatctacaaatctaggaatgctcagggccactagacactaggagaggagcaaggaacagactctccctcacacccgtaggaaggagttgaccctgacaataccttgagttggaacttttagcctccagaactgtgagacaacacacttctgttggttaagccacccagttacagcagccccaggaaactaatacaccatgtaactttg

SEQ ID NO: 64038 - DNA, 761 bp, Bovine  19866880425834
  misc_feature (1)..(1): n is a, c, g, or t
nagaaactgagaaagaacatttaaggagcagggcccttaatcaaaggcaagtccttatagatcaaaatatcagagagaaatatgtaagatgcagaggacaggcaaatggagaaatggcactgaaacatcaagcagataatactttattcgaaaggtttctagctagagacgtgagttctgtgtggtttctgcgctgacagtgtccagaggttggttcagaagggaactgttaaagccggaagagccagaggggtcaaaggatgaaggatattattgtgtgtaaaatcccaacctttcatctatggactgtaacctaatccttagaaatctcctgttctgttttccttctagtaaagagcaacggctcacagtaaacattcttctgagtatatgtgtgttggggagagaggagatatgaaagtaggtgtcctgggctgataaagcataaaccacaaggagcagatgctagcatttacccaaataatcagagcagaattatctaaaaattatctaaaaaatttaagcatctttagatttcaccatatgaccattgaaaagacacatttttttggtaaggcctggtcttgtttgtcttttactgttgtcctctgcttaaaacaaacaaacaaacaaaaaactgatagtaggaactagttgcgacaagtcatttaaaaagaagaagcctgccagaaaacagtgaaatgggggtaaaaagaagttgctggtgagcaatctctaaaatttatcagaatcccctgggg

SEQ ID NO: 64039 - DNA, 2672 bp, Bovine  19866880426427
  misc_feature (1)..(1): n is a, c, g, or t
ntccatgatagctcagttgataaagaatctgcctgcaatgtagaagaccccagtttgattcctgggttgggaagatcccctggagaagggataggcttcctactccagtattcttgggcttccccagtggctcagttggtaaaagaatctgcctgcagtgtgggagacctgggtttgatccctgggttgggaagaacccctaaagaagggaatggttacccactccagtattctggcctggagaattccatggactgtacagttcatggggtcataaagagtcagacacaactgagcgactttcagtttcactgtggagaacaatatggaatttccttaaaaaaaaaaaaaaccaaaaaccaaaaatagaactaccatatgacccagcaatcccactactggggatgtattatgtgaggaaaccagaattcaaaatgacacatgtaccccagtgttcactgcagcactatttacaatagccaggacacggaagcaacctaaatgtccagcatgtgtttctgagttcatttatggagtcaaataactttatgcacttgtaggcaggtgtttatttacttaaaagttagaacatgtctgacagtggttgaaccatttgcagaaactcaaacaagccagagtagaaatgctaatgataaatcagagcaggatcagataagactgacatgggaatgaaaccctgggaaaagaatgacatgaaaaccctaaagagaaagagaaacttagggaatgcaaggagtgaaaagtgatgggaccacggacgtgaagaattagcaagctgtaatcaaggtggaggactcttagcgtgtgcaatgtgcacaagtgtgaacactgccaagagtgaaaacatgaataaaaatacagaaagatgcaatgaaagtggctctgttgacccactgacagaaacattttctatgtgattaaatgctcactagaagtatgccatgcaaagctgaaagctacaaatacaaaagcagcttagtcattctctccccataaatatcccctagcatgaatcactgaccagtatttaagctcagacacttacaagatgcttcaaaaggtggaatacggaattcattaagtgttgtatcttaaaacaatgagattatttcgtttctcataatcatatgcataaactgattgcattcatatttcttgaaaacttaggacttactagaattgccataataagagtagacattttgtcttttaaccagtttttaaattataaaagcaatgcaggctcatggacaaaaacaatccatgcagatggtcacaaaatgaaaacactttcttccatgattctacacttctttttttaaatttatttttaattggaggataattacttcacaatattgtgatggtttctgccatacatcaatatcagctcctggacatacccactgccactagttccttacattatccttagagaatttttctataagtagagagtccttaacttgcatcttaggaatatctcatttaaaacatgtaccttagctgccaaaaagaaggcaaagacaacacaaatatgaaatgacagtggaaactgagaaaatttttaaaagctcaaatgaagagcaagaaaaaaataagcataggaaaacataaatgttggaatatggtaaagctcttcacaatattttccagtgccatagagttgagcatttttgctggggtggattcaaaggacaaaagaccagagaaagaaaaattaaacctgtatattatttatggaagccagaggaggggaaactgagtggcttccagggaagaactgggaatatcctcagttgttcttaaatttctcaggtcatattgtgtaacgtaaacggcagtgtcttgaatctgtagccaaattcatctagtcttatgctccttaatttatttttaatgtctttgtcgaggatctactatgtgacattagctctgatctcaaagagcttatggcagagctagaaaaaacacgacgagcagagatgaaacatttggggagtaagacttggtatataaaaagagatagattgaatataattaagtggcagcatgcacttaattaaattcaagccataatccatgttctgattttaaaagtctgctacaatttctcacttaccactgtaactaatacctggagttcagctcagtccactcatgtaatttagcaatgactatgtttccattctcaaacagaactctgctattgttgaaatgtgtatatggttgtgtgtttaaaaatacctgtttgattttggggacgggagggtgaatttgattacatctagtgattgattcttcaaacttcatgcctctgggaaaatatgtcacagatcataaactccagagagagaagcccgagaaatcaacaaggtcaatcccttggccaccaggtgggatggaacttctgactgatttcctagccaaagagttacggtgacatccgtatgcatcttttcttcctgcatatattgaatcaaagaacaagcaggcatctggtactgaagcattataaagtcatatgtgatgctcactaatacaaaacgcctggaaggaaatgaagttaatacatatggcattcaatttacaaatgaagactcatttatcatcaaagacccagaatgctcactgccagacattagaaagaa

SEQ ID NO: 64040 - DNA, 1783 bp, Bovine  19866880478004
  misc_feature (1)..(1): n is a, c, g, or t
natagttaggggttgtcatgctctgccacagtgacattccttgcagtgttttatgctgtctcacgactctgcatctttgcggtgatacagatattcttgtctatcttgtgaaaacggtgtgctccatgagcatgagcaccatgtctttttattgttatagccatggcgtctgacacagtgtctggcacgtggcacaatgagatgaaggactggtaacttctaaagcacgtggacgataccaaaaggagacagtgcttgcagtctgagcacagccaccacagtgatgagggcacagttacctctgacagtcacaggaaaacaggaagtgtcccaaaaattggggccaagggaagaaggataggatgagtgatgggcaccaggagaaaaacatgaaatgcttaaaaacaaactgtctagtgcctactttggcagagggctggccctgatgtgaagggtggctcaaaaggaaatgactgcccgacataggagtaaagaataccaattattttcctcttaagtagggccagaccaactcagcagaaaaccagaggatgggcactgctttcctggaaggaagctgatggtgctgatgccatcggctgggttgactaaggagacatgatccaggagccacccagctgaaggctggtataccacagacagacatgcttctaagacctgcggcaattaggaattcaaggttagccccaacttttcagatgaagccttctaattttccttttccctcccccgagcttcttccaggaaacctgccttgtcctctgctgtggttggaaaagatcaaatgtgccctttaccgaaaaggcagggctttcctctccccactgctccttcatgcgcacccccatgtgacggctcatacagggacactcccggggcctctgacacagagctgtctcaactctctgtctctgatcctttgtctcaattgagggcacaccaggtcaagacagaaggccagacctgctggtccaagatggttaatgatgatagaataaagtcaccataaaaaaccattattttgaacagaatttttttgagataaattttgagctcagacaattcagagatgcttttgtgcaatacctttataatttcactcatgccaacttcaaccaaaaactttatcagaataatgaggcaaaaatcatggcggggggaaatgtggtctattctccaaagtggaaaaaaaaagaaaagaaaagttgttgaaagaggagaaagcaatttgattccaccctggtacccaatcttttctcctagaatttcaatgagatttctaaagttggctagacgttctcccactgcaccccaggagcacacaggagaactttccagtaagtattgtctatatattattgtctccattctgcccagttgtatcagtccttataacctgtatattatagaaccatttcccttttacttctgtccctctcatcagcttgtggacttctgggagacaggaatgtatgtcaatgatctcagcttgtcaccgctgggtcaccctttccttccaaagatggtttcctgtgtgtcactgctggtctgtaagctcaccacgggcagggacatggcttatttcagcacataagacaagaagaagacaatgggcatgtactggctgcttgtctgctttggccaaaacattggcaggtcacatatttccatgcccaaagtttgtttgcagatacacacactgttgccctttctgaaatcttcatttttctcacaagagttaaatactgcccgggaaggattt

SEQ ID NO: 64041 - DNA, 1221 bp, Bovine  19866880571423
  misc_feature (1)..(1): n is a, c, g, or t
nccctgggcttcccaggtggcactagtggtaaagaacccccccctgccactgcaggagacataagagatgtgggttcagtccccaggtcaggaagaccctctggaggagggcatgacaaccaaactccagtattcttacctggagaattccatagacagacaagcctggaaggctacggttcataaggttgaaaaaaagtccaagaagttggacacaactgaagtgacttagcacacatgcaggcactcgtgagtcccacccatcgaaagacccatcccattccgatatcaatcttaggcgcaaggttcaacatcttatctaaatcaggtgtagctgaaaccttcacctcttcttatcaaaatagcatattactgttgcttttatctcatagtgaagctagtaaatgattttcattgaagtaaaagtgtcagtgtcaccatttcaagacttgtttaacattcttgtctattttgtgtaaatcagttgagttaaaattaaatgttataaactacaaagccatttacctggcacatgtaaatggaatatctcataggacactgaccaggatccggtgaagcggacaatgctgctatccccccaagcctatggaattctcacttttctgctgtgagtactttaaatacaccataaccttccaaataatggagccttattttttaggttaaaaaattatgaatatgtagtctttttctttgttgttgtttagtcactaagtcatatctgactctttgtaaccccatggactgtagcccactaggctcctctgtccatgggattttcagcaacagcactggagtgggttgccatttccttctccagaggatctccccagcccaagaatcgagcccatgtctcctgcttggcaggggggttctttatcattgagccacctgagaagcccccacaccctaatgagtcgcctggcacagcccctagggtacaaacatactatagtgaaagcaattcactttataagaggacattcagtgaacagaagttgcattaataaaagaaaaagtctgtcacaaagtagggatggacacaaagttgaaagaaattgctgtatctgtaacagaaagtaaattgcagaaatctctgggtttttccaacaactcattacctcagtgatgtagtcaaaacattatggaagattggaacttattttcctataaaatgcatacccagtggagactgatttg

SEQ ID NO: 64042 - DNA, 1491 bp, Bovine  19866880584744
  misc_feature (1)..(1): n is a, c, g, or t
nttgcggcacacgggcttctcattgcagaggcttctcttgttgtggagcacgggctctggggcatgcaggcttcagcagctatggcacacatgctcagtagttgccgctcctgggctctagagcacaggctcaatagctgtggctcatgggcttagttgctctgcagtatgtgggatcttccaggatcagggattgaacctgtgtctcctgcattggcaggcggcttctttaccactgagccaccagggaagccctatttataccattttatctaaaaaattatcagaaattcttttctagtcttttaagttcctaaaacatggaccagcctatttcacggtgcattgtaagcactcatgtattagttcatgcctcttccctcaggttttgtgatggatctcaaataatcttcatgaaaaaccctgatacataattatattcatttcacagacaagggaaatgaggcttaaagggttatagtcataaaaagtcgtacagtgtctgctgaaggtcacaaagatcatgtatcatttaggttgcagaagatttcaagtttcagatgaacaaacccaaaatagattaaccagtgaagaaaatcattaactttcaggagaggaagcccagtaatgggaaaaattctgtgttagctgatttcccagttcaatagggccatcaagacccttttcacttctccattctaccatccataacatcaccttaagcctgggtctccacatggcactacagctacaagcttctagttcacatctagcaatagatacagctcggttgaccataggtttcctccctcaatcctcctccaaacttgggtttttctctttggtccaaagtgaatcacatacatccaatagtgaactaaaacactggtggtggaggtacgattacccttaaaccacctaaggtcaagtccccaaaccacatctctgttactcaacaggcaggggcagaatggatgctggagaaccaagcacaatacccagttcaggcagtggaataaaaagaacgcaacctatgagagcatgaagctaattactgttaataacaatcagcttctccatctccaaagatcagcctacttacagtgaattttcaattaaatatactaaaactgtgattattaaaaagaggtgagcttgtgtagggagatgggggatttagacattaatgagaaaagaaaaaaaaaagtgtgtgtctttgttcatactcaagcatgattcccagctgtttcctgccttgaaactcacatcctgaggaatatcactgagctgctgggagcttccagtatctcctgtcttcctctgctatcccctccccactcagactctcctacttccctcactcctgctcatgttggtccctcctcctagaaagaggttcaactccacccaaatcccacttccttctttggggcgtgaactcctactcagcccacgtgtccgttccaacgtcttcacagagtcttctatgag

SEQ ID NO: 64043 - DNA, 1443 bp, Bovine  19866880596785
  misc_feature (1)..(1): n is a, c, g, or t
ntacagccttcagctgattggacgaggcccaccccccattaccagtaccgtctgctttccttaaatttgacaaacttaaatgtgaatcacatctttataagaaacacctttagagcaatcttcattgatatttggaaaacaacgaaggtactacagcctagtcaagttgacataaaaattcaccacatgagacatcagatgcaaatacgatgcatgggaaaaagaatgtttattaaacagtatgcttaacggacgacaacacactacgctttgcttttctgttccttttatgttttttcccacatttgatgaacgggctgagggagatgcttagaaggtttcactcagcctattaacaaaggaaaagtctagaaaaactgagaaagaaagaagagaggcccctgcagtctttacagacaacactacttctgccagagcatagtatttgtgcagtggtaaagaatctgtctgccaatgcaggagactcaagagacacaagttcgatccctgggtcgggaaagtaggaaatggcaacccactccagtattcttgcctggaaaattccatggcaaaggcacccatggcaggctacagtccatggggttgcaaagagtcagacatgactgatcacacacacacggtgcttgtgaagtgctgcgagatgactctggctgtctttgatggccatacacccctgagggtgaacactccttcgatcacacagaaaatgagtgctcacatctctatcatgattcaccatccttctgtttatttttaatatatgtttctaagattaaatttgtgaatttttctcctccacaggcttttgaagcttcttttatattctatcagtgacagaacaaaagaataaattgaattagatggcaccatgcagttagggatgcctgaacctcacaattcctacattattttctgggaatttgaaacttatgacagtcactcaaaccaagaagcaatgtgttgcttgtacgtgaggccccaaatagcctactctgtctttaactagtaaagaaaaacataagttgtttgaaatgacagaaattgatttaggatggggtagtaacactgatttggagaaggcaatggcaccccactacagtacttttgcctggaaaacccatggacggaggagcctggtaggctgccgtccatagggtcgctgagagttggacacaactgagcgacttcactttcacgtttcactctcatgcattggagaaggaaatgtcaacccactccagtgttcttgtctggagaatcccagggatgggggagcctggtgggctgccatctatggggtcacacagagtcggacacgattgaagtgacttagcagcagcagcagcagtaacactgattacttattttaacactcccagtgaaagagggaatcacttttgttgatggttgcagaacgtgcca

SEQ ID NO: 64044 - DNA, 1464 bp, Bovine  19866880635253
  misc_feature (1)..(1): n is a, c, g, or t
nctttactttcaaccaccaacccttgcaaaaattaaacatcacttttgcctcaacctcctccatgactctaatccccaactaagaatttctctgttctttacccaaatttacatctcctaattgtgaaaaaaaaaaaaaaaaaaagggaaagtcatcattatatgcacactgtgccctggggtaattctcagtgctttacccactggtgatcctggaagacccatctctttagtggttatccccagtgaatatgggttttaagatatgagaaataaaggcagagagttttttgttttttttctttttcctgagtaacaaagaaatgcagaaaagccaaattcttggagaagtagaaaaacaactgggaagcaatgtggaatcttaccacacataatagattcaggtagctccaggataatattttctttaaaaaatattcattacacttgccagaagacttgaaaaccattgcttcttgccaaagcaaagaaagaatgctggatttcagaccaacccatttccctatgcacacagttctagaaaaccaaagtaaatatttttaaaatgctcatcatgttttaggcattcagaaaaaataacgtgtatggacactgtactttcccataacataaagtggggaaacatgtaaaatgagacaattggattttatattattatttgaggaagatgagggaaaagatattggaccagtggtattcatactacttataactaactcaaagtaccatatgttaggtactatggcagataagagaacatattttggagttggtgcagctaggcttaaatctagaacctgctttccactttctcccttaacttcagacaagtttctaagcttcattttcctctgtttaaaaaaatggggataataatagtacctatcttattgtatatggatttttcttgttatattcagtgtagtggtaatatctggtaccttgaagtgtttcgtgatgattaaatgagattttatatatatacataaaacacatcaatggtcaatgaatgtttattattatgattacaatatgtcttggtactacctatcaggccaaaaatgtaaataaatccaagccactatttcttaagttatttctgactcaaaattagataacaggtccttaggttgctaccattacatctggagaagccagatttgccatcaaaatatcttgagaaaaccataccaaagcatggagatcagttctgagatggcctccatacccacctcttggtggtcctaattcatgcccttgggtaatcctctcccttgactgtgggcgggacttagctactgcttctaacaaatagggtacatatagcacaagagttggtatgtcacttccaaaattggttatagacagactcctatcgtgtcagatctgtctctctccctagtcccttgtctctttctctccttttctctctctctcagttca

SEQ ID NO: 64045 - DNA, 1605 bp, Bovine  19866880663983
  misc_feature (1)..(1): n is a, c, g, or t
nggacccagtgtgatacagcatgtaacttgtcttgatcctgagagccgtggtccaaaattcaactcctttatatttagaaaagttatgaccaacctagatagattgttaagaagcagagacatcactttgctgacaaagggctgtatagtcaaagctatggtttttccagtagtcacatatggatgtggaaattggacaataagaaggcttagcatgcttttgaactatggtgctgaagaatactcttgagggtcccttggactgcaaggagatcaaaccagtcaatcctaatggaagtcaaccatgaatattcactggaaggactgatgataaagctgaagctccaatactttggccacctgatgtgaagagccaactcattggaaaagaccatgatgttgggtaagactgaaggcaggaggaaaagggggtgacagaggatgagatggttggatggcatcaccaactcaatggacatgagtttgagcaaatccaggagatggtgaaggacagggaagcctggcatgctgcacttcatggggttgcaaagagtcggacatgactgagtgactgagcaacaacaacaaaatgaaatagtttccttactatttgtcttccttactagttttctggttcccttagtaggcagggccactgagttgtcacccacctgtctacagagcctagcaacgtgctgaacatatattaggtgctcaataatgcttgctgactgatctactatcttggcaaaatctaggtcacaatttctggatataagaaaaaagtcaagggttattggatacctgtctgtttgaataaaaatcttgcagtaaaagaatatactgagaaaggaaagggatatctgtcttctgtccctgagtctacaatatatcttggatttcctcaagccctttaattttccgtctgtcatttcttggctatcaacacccctgtctggtggatatggcaaaactgctttcagtaagcaaacttcagggggaaaaaattaaaaagcatgataagcacagcacatgctcatttctccttaattgcctgatcctccatctgttggtctaggataatattgataaaggaattaaaagacaccaccaccatctcctgaatcaaatgagagcagtcattctcaaattacagagcatgacatttttatgttttgcaacatgaagaggaaagagcatttaatttattttaatgtggttaattagaagctagattagatcctctagttaactcataggttcttgacttttaagaccagaaattgtgtagcatctcatttgcacagtggtagctgctgctgttaatattggcttgtgtctaattaacggggatgcttacctggaatcccaaatacagaatctataaactaaaagtgagaactaatgtgattttaaggagagaattactcttaagtaagagccagctgcgtgttgcctcaaactaagcacaacttcaatgcttgaatatgtcaactcgtttttatatgtgggagaaaggtactttaaagcctagctactttctcatggtgagactagatacagtgaggaaaatttcaaacaggtaaaagcaacactgggtcagca

SEQ ID NO: 64046 - DNA, 1309 bp, Bovine  19866880713838
  misc_feature (1)..(1): n is a, c, g, or t
natactgctgctgctgataagtcgcttcagtcatgtccgactgcgcaaccccatagacggcagcccaccaggctcccccatccctgggattctccaggcaagaacactggagtgggtttccatttccttctccaatgcatgaaagtgaaaagtgaaagtgaagtcgctcagtcatgtccgactcttcgtgatcccatggactgcagcctaccaggctcctccatccatggggttttccaggcaagaatactggagtggggtgccattgccttctccgtaacagatactattacacgtaaaatagataagcaacaaggatttattgtatagcacagggaattatatgcaatatattatagtaacctacaatggaatgtaatctgcaaaaaaaatgaatcactatgctgtacacctgaaacaaacacaatattgtaaatcaactatccttcaatcaattactcattcaatcaatcaatatctcctaattcttccagttcaagagaattcagaaatttagcaacctctgtctggggctagaagggaagaaaggagtccctaacatgccctgttatatgtgttcttctcaatcattcactctgtcactaaataataacagctgttgtcaggagacgggggtaaagaaggttgccaggtagggggtggcgaggtgtaacctgaagaaactatgagagaattggctgccggcagcctagagaaaaggtgcagagaagtcagagtatctgaccttggcaggtgtcctcgctcattttgcaggagatcttccaagttttcttggtagctgccttttcaactctgctaatgatgataaactgttgcctcaggacccacagccaactctctacactgcctatgagtttatcactctcatcaaccaactacagatcctaattagaaaacataaatatctggtcgagtataaaaactcacaggtgttatattgatcctgagtgacactgacatctaattgaccaggtttctggtggcagttctcttgggaactatgcaacaaagctagtaatggtaaaaaaaaaaaaaaaaaaaaaaactggagagaataactgtcactttgactatgcatatggtgccccaagtttagagatgaattagagagagcttcaaacctagagggggacttccctggtggctcagtggtaaagaatccacatgcaatgcaggggatgcagatttgatccctgtgtcaggaagatctggaggaggggacagcaacctacttccccacttcagtattttgcctggagagtccccatgaacagaggagcctggcagg

SEQ ID NO: 64047 - DNA, 769 bp, Bovine  19866880926438
  misc_feature (1)..(1): n is a, c, g, or t
ntccccaaaaatgtgtgtgtgtgtgtgtgtgatcctagcgatgaatctcacggcttagttcatttaaaaggtgaattctcatcagggctgacttctgtgtccttatgagtttttaacatttcggtactttaaagaaagcttagagctataataatctgatcaaaaaagtatacaggactctaagcaaaaggaagcctggaagactattgctttactatcaaagaaaatctgaaagaactgttacagattcaaatttcaactgtgtccagatttcttagcactgtatgattaaggaagaaatctaggaatagtcactgcagacatttgtgttctttatgttagaagcaagatgtgaaaatggtccaaattactagtattgggatgacatggcaaggaagatacagcccaaaccaatagaaatttgatgctagagtagagatatatgattttagaactgacgattctataaaatcctatctaaggatagaatcatctaattcatcagtttagacacattttggagctattcttcactgtaatagtgaggttgtaacatttgacatctttatgtagaagacttaatttaaccaatatagtttttgttgactccaagctgttgatgttatgatagcagtgcatttatcaggtataagatgtttcttcaatctgagctctatttttatgggctgatcagtattcagctcttccttcaacagaaagctgtctcctggcttgtgagggggggtgtgttctcacagtcacaacatgg

SEQ ID NO: 64048 - DNA, 731 bp, Bovine  19866880976068
  misc_feature (1)..(1): n is a, c, g, or t
naaaatgaataagctaacttatcagatagcctctgattagtcattcagtgctcacattctatagtttttctcctgtgaaagagtaacaaaactgcccatcaccaaaatattgtaaggataagtaatcctaacagtggctggggaaagaggaggaaacaagatagttggaacctcatggcaaagagaagcagtcacgaaaagtgactgtaccttgctggcccagaactgagtcacaatcacaatgcaagataaagacattgtcttgattagaagggtacaggagttatttttttctaactttgggctggatggtaacgtggatttgctaatactgcaccccagcagtgagtttaccccttacagaagtgcccgtctctgtaacattggcagcctggactgcagagaggagatgggcttctgcagcaagtacctgggacccagagagagacaggccccaactacggatgccttgctccctttcacaggcttgcatgtgtctacttgtcttctcctcaccagaggagagcccgtcgagagtggagagagaccagcagtgctctcctcttggattgcctcccacagcacaggaatcgaggaggaagatggctatctgggtgctagcccacctccagtttttctagctgcgtttccatgtggcgaacatggtttttgtgtgcttctctttggtggagctttttgcctgacctgtgatagactctccgtgaggttgg

SEQ ID NO: 64049 - DNA, 1778 bp, Bovine  19866880988825
  misc_feature (1)..(1): n is a, c, g, or t
ncgaagagttgactcattggaaaagagtctgatgctgggagggattggggtcaggaggaaaaggggacgacagaggatgagatggctggatggcatcactgagtcaatggacgtgagtctgagtgaactccgggagttggtgatggacagggaggcctggcatgctgagattcatggggtcacaaagagtcggacacgactgagtgactgaactgaactgaactaagttcttaccaggaagaaacaagtacagttaaagcagttctccatctgattgaaaggatgggaaagggtgctaatgcccacctggcactgatagacttttatttagactttctggtgatctcacagctacagataacaaactccttaatcacccatcctttgtgacaaaatccctatgggtgtaaagagtaactctgtgattaaaaataactgtgtccttcatgacacatattgccattttccctgctgaactacaaacaggctttgactccatctggagtctcgggggttttgttttttatctaaaattgtctgaacacaaaactaggttttaagggcttgaccgttgagtttccaacagcttaacaagttactccttaatggaatagccataatgttaatcttgaagtcatttgttttcttctctgcatcataataagagcggaaattatgacaactcggcagtttctaatatgagagacatttgggctgggagtcagtctgttgaattcaaccagcactgggattaggaactgccagtacttgagtttcctcatccttaaaatagttcctggtagataataagtactgtgacaatacagataattgaaataattcttgcttagactctggggagcttattccattcaagccctaggcttagaaaggaaaggttgagaaagagttgacttctttgtcccttgatatgggtgtggaaagtgttgactgtggcagaaatcctactgcccaggtggagagaaggtgactgggtgtttacaaagataggagaatggcttcagcttaggagcaccatcccagaccctgaaatgtagctcatagagtattcaattggatagacatttactgagcacatattagatgctaaatactatactgatttaagacaacccctgccttcaaggatccttcagtccagtgagtgtttcaaagacttagacttttaacttcttagagtcatattaaaattgatccacaaatccagaatccttagtcccaggtgaggccagggtgactagcaacaacagtaacaatcactatcctttattatatatttattatgtatcagctctgttttaagctgtttacaccgtcattgtatcctttcaacaactatgagactcttaagatggaagctattattttccctgcttagtggataaaataactgaggcacagagaattgaagagacttgaaccaggtcccagtttcagaagtgacagggcaaggatttgaacaggctttcttcgaagcccactcttagacaccaggctaagtgtgcaggtgcaaccataatggcatggagaaaagacatgcaagggagagtgttggaactgcaggttaaaaaaaagtacagcattgcacgtataacaattcaagttctgtagagactcacattgactttttctaataatgcaataccctgtgaatatatttcatgattcctttgtgccatgtcccatgccagatactagagttacagttcagaatagagcggaaatggtccctgccctgggtattttattttatttgt

SEQ ID NO: 64050 - DNA, 1326 bp, Bovine  19866881132474
  misc_feature (1)..(1): n is a, c, g, or t
ntctcttttaaaatttgcatcagaaacaacagtcctggtttcaatagctcactgggaaatgaaagctttgcagaaatccctggcctatgtagtccattgctatgagattcaaggcttctccctagccctggatgtgtccatcttccttaaacagggctctggtcccacacctttcttggtgagacaccgccaaaaaacaaacccaatataaacagagacaaaatgtgccttttcctcagatacagaagccacaccgcaggtggagaaataggaatgtcctcccgatgccatgtaacccctacatctgtcccaaagctggcacaccttctagaaaaaaagagaggcgaccatttaactggtgggaatggaagaatggcccagaccagctgggttgggggacaggaattccggaaagcatgatgacattgaagctggtataacagcaattacgtgcaatgtctcccttctggctggagaaaaagcagtgttcttccaaacagaattcctttgaaaatgccctctctatagaagaaagtaaagttctaaaatttctaatttcgcttccaagtttcttctatttttccctaccctctccagccacccagagctcagctaatcctccccaaaataaaatatttctgcagttgttcccagccttattctcttggccattatgttttcatgccagctcctcaactatgattatattgatccatgtaacagtaaaagaaagcccaaaatgagtccaagaccttgggatgttcacctcatagctcattttgacagatttatttaagaagttgtgtgtgtgtgttttaactcagttttgtttccttttccaactaagtatatcctcagcatcaaggccaaatttatagacttatgtagtggattccctggaattagtctccatgtaccttccgcctcatcccaaggcagagtgtatcagaccctccctctgtgaactggacaaactcctggcttctaatgctgcgcctaatgccaaaaggcagtgtggtgtgactgccatctgctggcgtggtgctgacattacagcatagaccaccgtgcactaatcaggtgacacttgtttgaaatcaaaagctttctctgaacaaatgaaaaacaagcttcctcaatctagcttcaacacacacacaaatatttacactggaaaagctgaagaattctggaaattttttttatggaagacttccaagtgagaatcatactctgaggaaatgggattacccagggggactccatcaccaaaaacctagaagccaaacctcatcaactcagacagtggattctaccttgcgaagc

SEQ ID NO: 64051 - DNA, 975 bp, Bovine  19866881164194
  misc_feature (1)..(1): n is a, c, g, or t
ntcttgctgtaggattttatacatagttgctttgtggtctagttgttaggacttgtggcagtccagttaagactccgcacttccaatgtggggcacccaggtttgatccctcgtcagggaactagatcccgcatgctgcagctaacgcctggcacagccaaatagatgttaaaagaaaaaagctttgaagcatttttaaacattcctttggcattggatcagtggttaggatgaatctgtgcagagagaccagcaagcctagcacccacctcttcaggctctgtacatgttgggtttacagcgatgagtggaataccacaggggcgggggagactgtcgatatctcatgtgcttcctggtaattaattttgaaagatgcccaatgcacagtgggttgctcacctagtgacatttgattacctgagaatccccaaagccatgcatacaaacactgacaaataaaagcagatgcaccaacaggtctggtctacctagccaaagcagaaaaaaccttgaaggcgatttatgatatcataaatcttcaaccataggcttggataagttgatactgtacttcctcgcttgaaaaatcctctctgaggtacaagggaagtaattactgagtcttcccaggatctaaaacagaatccccaaacaaaatgttttaaggtttccttaaattaatttttggagaggatttggtaactgtgtgttctgccaacaacatacaaggatttaacctttaatttactgtgtggaggctgtctgtgccttcttagagagctgaagaatagtgcacaggccacattttccctctgtttgaaaagcactataatttcttacctttatattaatactttggctgggaattaccattattttcatttcctcctttgaacatcatcagcacctgaatatattcaaccaaaaacctagattatctaaaacagtcatcttatcctaggattaaccaca

SEQ ID NO: 64052 - DNA, 842 bp, Bovine  19866881174863
  misc_feature (1)..(1): n is a, c, g, or t
naagctatagagcaaagaaagagaagcctcccccttcattgtgtgcctgggtggagcgggggagagggtacttttactgagattttccaaactcactttgaattactcaatagcggaatcttacactgactgacaatatgtgtttgttaacaggaaattcatcatcccaaggaagtactggttccttaagaaagtctataacctctacggtagccaacatagcgcaattcactcagtattctccagattacaaagtctcggggatgagaactgtgtcctcccctcagcctggtgtgatcacagtgttctgcattgtggtggccactctgtaaactattaattgtctgagtaaaagagggagggggaagggaagaactaagagaacctagacacatcatccaattatttcagtgtccactgtagtttccactcctaacagcctggtgagcagagggagtttttcagcagtcttaggggagacttaagcatatcaatgttttcagtaacttaaaaacccgtgcctcaaactacattcccacaccagacaactgataccaagttcagcactaaataatcatcttccatcagaaaacatgagctttaatggtttccatcaaaggggaacagaaaggaatcatttcaaaagtcacttttctacaaaactgctgtgaacttttaatttatttgtgacaactgcagattaaggaatttcatatccagcttaattataagccttgtcagcaggactttcctgatttgttatactgagaaacaaacgtatcgtcagacgggaaacgaatctgaacaaagtcaacataacttaatggaaacaataattctta

SEQ ID NO: 64053 - DNA, 848 bp, Bovine  19866881213141
  misc_feature (1)..(1): n is a, c, g, or t
nctatcaactgatgggcttataaagtagataaagttgctaacagttggaacattgatacagaaaattagaatccctttccctgtgatggaatctattttttgtcaattatcttttattgtttaaggaatacatattcggtgtctttaaatggtctaagtgccttaacagtagtttctaaatcttccactttaaaattgtgttgagcaccgaataagatccaagtaaattctcatccataaatgattccttatcctcttttattttctcactttacctcttattcctgaaatgtgattttgatgtgggacaggcatgctgattttgaaatagttgcaaccctgaacatagcagtttacacagaatccatagaaaatatctctttaaatagagatacacaaatgtgataaatttgtgtattcatacttaaaaccgacaaattactcttcttaacataatcctaagggggttaatactagcgaatattatggcaatctcaatgcctgtaattgtagtgtactgaacacttacaggaaattgtgtaagaatttgtttaaatggaatgctgccctcttatggttacacaaatccttctagagccaaacataaaattgtagtcttgagttagggcagttaatagaggggtttaattagtggaaagagccaaaaaatgtaagccacacgtggattttatacactacaaattagagtggcatagaggtgactcattgtaagttcatatatctaggtaacatagagccaaggatagaacccagtttgttgcttttctccttattttaataatgcatatttgaacataattttaatttctactttcataattcagata

SEQ ID NO: 64054 - DNA, 1438 bp, Bovine  19866881336535
  misc_feature (1)..(1): n is a, c, g, or t
ntacagatgaatctatttgcaaagcagaaatagagacactgatatagagaacaagtgtatggacaccaagggggaaaagggagagggggatgaattgggaaattggaatttatacatatatattatagatactatgtataaaataggtaaccagtgagaacctactctatattaatagcacagagaaaccctactcaatgctctgtggtgatgaagaggacatatatgtatacaaatagctaattcactttgctgtgcagcataaactaacacaacactgtaaaccaactaagctccaattaaaaaaaatcttagcaatgtaaaacagcatttttattaagttcataagttttggggttggaaatttggacaggatgcagcaaggatgacctgtatctactctgtgatgactagagcctaaggttggctgaaatagctggatttggctcatctggtttgactggagccatctgttttggactttgattctggccatcatctgggttcctcagtgtttctccagcagggctagaatgttcaaggttttcactgacatatctttgcctgggctgcgatggttgaaacaactagagctacctaggcaagatctacccctccacaaggaggttagcttgggctgcctcacgttgtggtggtctcagagtagtgaatttctctgagatattatggctgacttttcccagagtgggcattccaagagaccaaagtggaaagtggaaggcctcttctgatctacttcggatgtaatctgttgtttacagttgaatcccagagccacccaggctttaataggcaagggatggctgtaccagttaatactgggaggtgatcaaaggtgggtgggaggggtgccttttttaagaaattaactaccacagtgcttaagctatgttcttaaatagctaattaaggtgctactggcatcttcgtctgtcttattcctttgttatactttctgcttgcttcaaaactgagaccaggaaaattgaaatatttttttactgatcttcccgtacatcaacaaccgctatcatctgtccttgcaatatggtttgtatcagaaatatcctaattataggcaacattcaaaaatgctctgcttgcatgtaaataagaggatgtaaatagatgcttggggattgggatgttgtctaacaccaggtgttagacacaaattggcatcacctcttagttaaggaataaatcctaaagacagaaaaggattttgaaaatgtgattgctaaaacattctggtcattgtcattcccaaattcaaatttaattctttctccttgtagccaaatggctgttggggctacaaggcagttagagcatggaggatgtgaatgagagcgtttttgtaggagtttccatgctttggacataaacgagcctgggtgcaatacagataagcgat

SEQ ID NO: 64055 - DNA, 1338 bp, Bovine  19866881344239
  misc_feature (1)..(1): n is a, c, g, or t
ntattggatcttctcagtttacatagaattatctgattctccccatattgcggaacttctaggttgttttaatttctcagttttatacctggcactgcaacggacattcctgtgataaatcttggaatctctctgtacttcttgagagaaacttaaaagtatatcactaagttggattcacatgtaagtcactgagtgtacctgttaactgtaaatttaccatcgaaagtctctggagaacaaagtggatcatgtataccaaataaacaatatatttccatatcacttgaagtctgtatctatccttctagaacagtcatctttcaggcagtactttacttcttctaggcaaacagactattactgggttaatctaaatgcagtaacatgaaacttggctgacccagatttcttcaatatcagtatgcatgcaattacaatattctacagattgaaaaatacccaaggctctcaaaaatacatattttatcatcctttcatccaaaatggtgtacaatgagcattaaaataaaacagggttatagctgacagtggttgatagcaaccagatcttacctagacatataacttacatatagtgtgccttaaagttttcttcaagattcaactttattctgtcacttctagttatagggcttttaaatgctttcaacaaattgaaattattaataattcttctttagaactatatggttgcaatattccagttttaaattctccacagtctatttaaaattttattctatttgcttttcaagatgataaatagggtttgcaaaattcctagaaattgtgtgtatacatacatatgtatgtacatatgtatgtgttattgtttttagtcgctaactcatgtctgagtcttttgggacccccatggactgtagcctgtcaagctcctctgtccataggattttccatggcaagaatactggagtaggtttgccatttctttctccatggggatcttcccgacccagggatggaaactgcatctcctgcattggcaggcagattctttaccactgagccacctgggaagcccccacatgtgtacacacacacacacacacacacacacacacacacggacagagacatacctctaaaatgtttctctcccattagtagtgaaaagtgaagtaaaacaaaacacaataaaaatgccacttatatcatggccatatgaactacagtgtcactcaaatcccaaggcccctgaagaatgggtagttagactaaaatggcggggctgccctgtaccgttgtgcaagctgcacactgtacaactctagggtgtgcaacggtatccgatct

SEQ ID NO: 64056 - DNA, 1098 bp, Bovine  19866881423957
  misc_feature (1)..(1): n is a, c, g, or t
ntccagtacagatttatatcttagtaaactcctaaaagaggctgaaatggttcttttacttggtgaccctgatgctgggaaagattgaaagcaaaaggagaagaaggcagcagaggatgagatggttagatagcatcactgattcaatgaacaagaatttaagcaaactccaggagtcagtgaaggacagaagaaccggacatgctgcagtccatggggtcacagagtcggacatgacttagctactgcacaacaaatgttctccaagtcatcacccagctgggaccctgagttttgggtctcttttaggaggtgacatttcactgtgtactcctcagtttatggtaactgaatcatgtcgaatcaggggtaattgctcccaaattctttataagaaaaactcggttgtcatttgcattttagatccctgaaatggattggcaggcattagagagttaatccatcttctagctataagtcatatatatttttttgtcattctccaatttgacacagtggaacagggtgctgctattgagaaattgaagcaccagatgtgattaaataagatcacacatttcattctgtctttaatttcacatcactcttcagcagctgaatctgtatgctccccgcatggagtcagccagcaccaggcattcttagcgtgcccagcagagcgatagcaaaatgtttccaaagtcagccaccctgctgggctcttgtgagtcaaatctgtttttgcctccaaagaattcagtattgctagatctggtttattaaactattcctctccctagagagtaagatccctggcaaatttacatcattaatgctcaatttaaagtaagaggcattaaaaaaaaaaaacctagaatcaagaagaaagaaacaattagaagaagtcttcctatctttcccctcagccttcccttgtttctgctgtgacttctccatctctctcccaacccaccctgattctttgcttctaggaataagagttggaaatggcatttatacatctgctttgcaagcatgtcttaagaagcttttttgtgtggcattcctgatgtcgttgaaaaatgaagttgaaataag

SEQ ID NO: 64057 - DNA, 1111 bp, Bovine  19866881908101
  misc_feature (1)..(1): n is a, c, g, or t
nttttttggatcaatcaaacgtattaaggaaagcttacatgtgcttataatttcaggcaagaaaaaagattagaaaatagttgattatctgggttctataataaacaactagaaaaaattcttctctagtcaaccagttcagcatattacttcttttctccaaatggaaagttttaattatgtgttaaaacactgtttgtatcaggaatgattaacattaggtttaacattttctcattgtggttttatatacaaatttacaagtggaaaaagtaaaaggaaagagtcactttacactagagatttttgaagggcccaaagctttaagtggcttccctggtggctcagtggtaaggaatctaccagccaatgcagaagacactagagacatgggtttgatccctgggttgggaagattccctggaggaggaaatggcaacccactccagtattcctgctgggatactcccatggacagaggagcctggtgggctacagtccagactgagcaactgagcacacacaaagcattgagcagccattattaatcttcaaaatctatattaactcaattgtattaatgatggtgacattcagagaatcccttagtacgtatgttcaatcttcagttaatttgaatctatgaaaagataatgggttttctgaataatcctgttgcaatagttgcttccatcttaaaatcagataacgtcagttgaggcctttttcttcaagtatatatgcacgagacatttaatttatttcttcatttaaatttgttatttacaggacaaattttgcagtaggaatttcatgcttgcaaaagtcctcttgaaataactgcttgttttgcttaatttacagtgttgcaatatgcagtcaacttttcaataaataccatattaacaggaaaattattcacatgtgggctcatattaaagtaggaaaatccaagcctttcatatactgtaccaaacgctgtgtcacaaaattaagtcaataaagcatcatacctgcgcatgcttgaaatataggtatttataaaaaatttttttttccagacatctggcctgtattcatggccttaggggaaagtgtctctcaagggaaa

SEQ ID NO: 64058 - DNA, 1779 bp, Bovine  19866880693278
  misc_feature (1)..(1): n is a, c, g, or t
nctgggtcatcccagtgcaccggccctgagcaccctgtatcatgcatcgaacctggactggtgattcatttcacatgtgataatatacatgtttcaatgtcattctccaaatcatcccaccctcgccctctcccacagagtccaaaagactgttctatacatctgggtctcttttgctgtctcacatatagggttatcattaccatctttttaaattccatatatatgcgttagtatactgtattggtatttttctttctggcttacttcactctgtataataggctcccgtttcatccacctcattagaactgattcaatctcccttttcaatacacctgactttccatttctaagttattctatcactgttactagcagctaaagatagtgagaattattttattatttaaagtataaaatatttttatacattttagtatgcctacaatatgtcatgtaaataagtactactataattgaaagatatatgcatttagttcttttaaaaattaagacctttatcaaatgatccttttataaaaataatcactgaatttaaagacaatatatttaaattgctgtgtatattgtattttataaataccatacagctctattgttagttatctttttcttctccttaatatgaattacaaaatatttaaaatgttaggtgttaaaaacatccatggtgaaatattaggaagtgagtccaaactgcagaccctgtgactacattgtgtgctatgtttcagaattaaatactagtttttgagtgattattttcaaattgttattcaacatacaaaacacatggttctagagaagttcttctgagcacagagctagttaataagacacatagaatttttaatttcacacatgaagcaggaaggtaaagataagcattattttccaccaaaaaacaaacctttaggaaatagttgttattgttattgcagttgccagacactccttgcaattcagccacagtgttctaaaatggttgacaacaaaaattaaaacacgcgtttccctccactagagacagcagcgtaatacaaaggaaggaagaccactgaagttccagtgcttactgtaagataaactttcaagaactaagggaatacgcccaaactcttagtttttcaaccatgtaaccagttataaagccagttcatattattgaaaggccatccacagtaactgcaatctcttgtttgtacaacacaacctgcttccaaacgggaacagcaaatagagtaagtcaaatgtaatgttatccctttaatgctttttcacataaaaattacatttttgtaaacctttaactcttatgcaaaccataacttgcattatatttctgtttctaattattacatattaacacaagcaataaaaatgcttatccatgtaggcagctgctctaaattgtattcaatactttaaaagattctaaaaaaataaactaatgctgtcatgatgtagttgtaataataatttctagtaataaaaacaaattatgaaagaaagattaaattatattttaagagaaggagcctcggtttctggagtgataattaatcttgttacaaactaccacacaaaaaggctttgaaatgtcatctataatctaagacttcaaagtcttataaatattatatcttaatattgaaagaagcaaaagcaaaataatcatataattttaaaagtgtacgtaaaataactcattttaatgtgaacaaccattacatacgtcctaattttaaaaagtag

SEQ ID NO: 64059 - DNA, 1328 bp, Bovine  19866880742418
  misc_feature (1)..(1): n is a, c, g, or t
ngatgcagaaatgtttattttggtggagaaatgtggtaaagaccaactgtgaatggtacatggctactgaaaacatgttgaaagtcaggaacaaagactactaaatgacacgattttcagaagtgtgtagaattaggaaccacactacatctgtttccgtgtatccaatatgtatttctggtttatagattaccatatatagcatgtaagagctgccagttttccagtaatatgaatgtaaaccacatctggactagcagggccggctttatagacaaaggcttgatttcttccatctctgaccttcagtcctgctttctacgtttattgtcactttttatgtatattttttaaaaaactgctcactctgagattttaagttttggaggacatgacagagttttgtcaggcacagtttgaatactttataactattgaatttagttgaaaatgtcagtttttatcatgtaaattaatttggtttgatgaattatatatttctttcttttaaatattcttcaatgtattaagtgagggattataaaccaagttccagttacttttaaaataaatcaaatatttcagcagaaataaggacaataagttccttatggctacatttgaagaccacatataatgatcttttgaatgacttaggtcaggaagaaagacgtaccaatattctattttttctgcagatcttcagcaatattttgatagtgatttcattaaaatgttcaatgagaatttaatgtatatttgcatgcaagtaaaatgagagatgacaaatgagagcttaacactgcccggtacagtatagaacagaagtcagtttcggtgattctgtgtttccatataattctagtaccagcacactacaacaccagggcttccacaagacaggcatgaaatggattccgcatgggcatttgctctagcagcatgctcaagatgctttaccttagttttattgctgctaatatggtatagcctgattctgtaaaaagtgataaatattgataaccatgtaatgattagctgctggttacttttgtctctcaaattattcaaagtggtacatttttaaattagtgagttacttttattctgattccattttccttttcctaacatttctattgatttgacgacaaaacagttgtttagaagaaattcttcatacaaaatttgtaacgtatgtagttttggatacttagcagaatttttttaaattaagaaagctgtcttttctggattttcatcttattgttgacatcttactacaggtcttcagcacatactccaatgaagattatgacaggaggaat

SEQ ID NO: 64060 - DNA, 1223 bp, Bovine  19866880829088
  misc_feature (1)..(1): n is a, c, g, or t
ngaaatgacacagtattgcaggtcagtcatacttcaacaccaaaccaaccaacccacccaagaaatgcataaaacaagatcagatttgtctttatcaaaggtgggagttgggcgaaggggaagttagatgaaggtagtcaaaggtacaaacttcagtgataagataagtaagtaccaggaatataatgtacacgataaatataattaacatcattgtgtgttatatatgacgtttaagagagtaaatcctaggagttctcatcacaaggaaaaaataatttttctctttttcttttactttgtatctataagaggtgatggatgctcactaaacttaatgtggtaatcatttcatgatgtaaataaaattattacgctgcacaccttaaacttatacagtgctgaatatcaattatatctcaataaaaccagaagataaaaaatacagtataagagctaaaaagttaaaaataaatatatcctctccaaatttccttttattaacttctaagtttacattccaagttatttgcatgcatctctgtctcatttctttttcttggatatctactctcctcaccataaaagacacttattcttcaaaggaacatgttcaagtctttaaataaaacaacttaaaattaaaaaaaaaaaaagagtcacaccaaatggctcagtaaaggctagagggagaatctgatgtggttctctttagtccgcctctccctactcttaatcttgctgcccagaggctaagtcaggacccaaaagttaccatctccaagggaagagggaaggatacccatgaacatacttaggtatgttcctcactggctgagaaaaagtgttctctggttgaatttatttgcaatggtactactccttacatttgtacatgtagccacttcttagaaataatgaagtctcatcattaatcctattttatcttttcagagtgccagtcattaaactgtaataatattgaagaaattgatcatcaagtggatcttggacttaaattattaaaaataaagcaaataactgagttgcagaaaatattaaagttggcttaaagctcaacattcagaaaacgaagatcatggcatccggtcccaccacttcatgggaaatagatggggaaacagtggaaacagtgtcagactttatttttctgggctccaaaatcactacagatggtgactgcagccagaaattaaaagaca

SEQ ID NO: 64061 - DNA, 885 bp, Bovine  19866880853667
  misc_feature (1)..(1): n is a, c, g, or t
nagaaagaagtaactaggaacagatattttgggtgaatctatctttacttatcgtgcttctctccccgaccccagcccgcttctagtactggtatttctttcttctccttatctctcggggcactgagtcacatgaattaccagactaactttctgcctctcctgtacacagtcatctcccgagaagtcatcacagtacccacctgaccctggcttctaagtaaaggtcttccctcctggtccctcctgatcagaatcacacctctcccccgtcccctgtggtgatccccaaccaggggccacgcctgacttggagggaccagcgggggtggtgaagaagctgagcgaggggaagggtgggctgtgcagcgctcagcaacccagccgcacccctctgtggagggccgtcccatttacatccaggaaaggccgaggagttccctggacagcttaaaggggctcagagacagaacgtggcttccatgttgaggcagacagtgggcgaaatcacaaggcttttacatcaaatgtgaaaccatagtcctgatgactgatctgcaaaatctgcctgaaaacgtttttgtctgcgacagtttacgggtcacgtgcacgatctgagaaggcagctcagccgcccgtgccatgcacatacctcgtcggatgagagcaccaaggactgagagagtccgggcgttttgggctctgctcccaggccgctcaggtctgctgaactggtgctgctaggactgaaatcgtcattgaaggtaaaattctgaaaaagtaaaaaagctcagtgttaaatgagcatggtgagtgagccagagagaagcctgcttacaagctttagagaggttctttttagtcctcttagaagagatgcagatt

SEQ ID NO: 64062 - DNA, 1776 bp, Bovine  19866880894859
  misc_feature (1)..(1): n is a, c, g, or t
ncagtggctggcctccatgctgaaaccgtagtttatcagcacagggaatcctaggagtctttagaaagcagtctgaaatgatctgaactgtaaacatcattctaagtgtcagtggcactgggagggaaggtagctgaacagtgggggctggctgttcccagagagcttccatttgtggtatgattagttcctataaaccttaaaaggactctaattccagacctgttttgtgtgtgtgtgtgagattctgtacattaattcatcttctgtttatacatatttttagaactaataggtacttgatgaatcccagtgatgttaatgaacagaaatgtagcacgactggcaagtacatgatctcaagataccttgctgaaagttctgatttagagacataaaactctgcacttattcttaaccctatagttacaactatcagcaattataaaggcctaagctaggtatataaaattcacttctatatcacatcaatttgacaaataccatgaatgattcagtaaaatctgaagttaaatttaaggtctgatgacggcatagcactttttaaacctaagagttgaacaatttgattttcctttaacagcttgaaaatagatacttcttcatcatgtctaagggaatgaacataaatatgtgcctaggaagaggcctaacctataataggatcttgaaaaatattttttttttaaatgaatccaataatcccaattgcatttacttggtaatatctgtaacctgctaggaagttttcaatcatatcaagaaaataccctgtaaagtcatttgatgagaaggcagcattagatcacattaattttttaacattctttttagtaaataacaggattagggtctctacaatatatgcaattctcacctctaagtacaattctggctttgctatccatttgagtcatcaaaattatttttataaatgtaagtcactaagaattgttttgatttttttttttactttgccagtctccttctcaatacccaaactgcctgcaattctgttaaaatttgttatctttcatttcatctttccatttactagtgttttctctaattaatctcaagcatcctgaggacaagatgtgtattttactgtctttattatactattatttatcagaatctctggatatagtgttttaaaacatgttgccattctctcccattaattatttatcaccccccatcctaaacaggcttttgaataaagtatggatttactacagaagcccataaacacctagaagcttaaaagttacattcagtagactcagaatatacattcttctaattcttttatctttttggaaaatggaaattacttttctggttagtcagcaaataacataaattacatggactgatacagaatttcatcaatctcaaaattaaattgaatttgacatttacagaggaaagtggacaatgttgtaccccccaaaactgctaccaacacagtgtttccattggtatcctgatccttcttctctttctctctttattctgaaaatgcttaacatattttaagtaaacagaaactcttgaaagttctttgtcccaacttgcaaatccactttaaatgaggcaagaatagttcttaccgtttcatcatcttatctaccttcttgactaacattttatatttttaaatagcctcccaaaagggtaaaaaaaaagaatattgatttttttttttgtaacttactatgtgcccaacactgtacattctttaaaaactgt

SEQ ID NO: 64063 - DNA, 1030 bp, Bovine  19866880936215
  misc_feature (1)..(1): n is a, c, g, or t
ncaaaatactaagcttcttgggagtataaactatatttttccatgactcaatatttctaattcaattcctctttataaatgatagctacttactaagatataaatgtcattaagtctctgatgaatatattctatatgaggagggaaccagtgatccctatttttcccactgatatccagaactaaacagtcaagagaccaaagtagacctctgtaattcaaatgtcacactgcaatttcaaattggcagccttccttgagtttcattttacttgctaaggaaacaatgaagcacttattctgatgccagcagaattgtgggaagagacttaagagatttgtattttcctgaatctttaatctgcagaagagagcaactacactgaccaagtggcacattattattatttcaataattctttagttgtacaactaattgaatcttggaaaatatggtgtattcacataaaaattgactcatatgattgcaaaaatgctgattatcacatagatctagaaattatagcaacagaattgatagtaaacaaaaagtaagaccaacaaaaatatcattgatggtgtttctacggattaataataaatgtactctcaaacttataatttcctttgagggaaaataatttttactcctttcctcattatggctatctggtggtttgtgacaacaatttcttcttgaaaagtgtctgcaataccagcactcaaaagtcttctcgtcagttttcccggcatctttaaactggacagctccagccctgattatacccaacccttcccacaaacccccatagccctaggccattggcagtgcacattctgttccagcagatgcgaggctgggtggagaaatttgcagtcttaaagaagtactatgagtgtcccactttgagacacaaagtctttaagtcattttataggaccctggagagcaggaatcatgtcatattcattttatacccacataactgttaaatataagcaatggacacgacagattttacttttttca

SEQ ID NO: 64064 - DNA, 881 bp, Bovine  19866880941205
  misc_feature (1)..(1): n is a, c, g, or t
ntgcctgcccttgtgttgcatattctgcaggcaccatctaactaaatgtcatgaaaaccttgttactctaaggaactatttttatcctcactttatggatgtgaaattgaaacttagatctgaaaagtaactttaccaacatcaagagctgagatttgaacctaggcccaagtaatttcaaaaccaagtttctttaattggtctttggtataacagatactgtctgttcctttgtaaaacctatactgagatctacagccctcctgagtattcaaggctctaatatgtctacacgcttctggtccctctagaaccaccagaagaggcagaagctgtcagttgtacttaacattgtaattatgaatcttagtaaaatattaaatcctccgctagaatatgagtataaaggaagttgtgtctatgaaagcagataaaattctttgtagcgattcagagaagactggtagctcaagaaaactagattgaaaaggaaatgcaaaagagaaaagctataaaaatctagaggaatttcacacttattttgccttgcaagtgtctttttcatccattttaagacagtgcattaattctttggcatatacgctctggttctggtttatataacaaggagtacatgaaacatcagtcagcatacatgtgagccaaaccttttgaaggagacttctgtgcgcttgtccagggtgagcatactatgagagaaaagaagaggacaagaactttggagctcactacaggcaggcacaagtcttcaaagtgaactgaatgataaggttcaaagatgcagagagtgaatctcaacacaacaggattatgcaccagggcttttggttggagagaaatgaaaggaatgtatttccgtt

SEQ ID NO: 64065 - DNA, 1682 bp, Bovine  19866880973079
  misc_feature (1)..(1): n is a, c, g, or t
ncaatatggattttgtttatttgtttgtatgcctgttcgaggggacttccctggtggctcatcggtaaagaatctgcctgcaacacaggagaccagagtttgatccctgggttgggaagatctcctgaaggagggtatggcaacccactccagttttcctgcctagagaatcccatgaacagaggatcctggtgggctaccgtccatagggtcacacagagttggaaatgactgaagcgatttagcagcagcagcatgcctgtttttaaaaggaaagcagagtggattgtcacctgagcagatattctcaggggcaaggagggtaaataaatattcagtgccaggcattctgccgggtgcctttcctacatgctttcagataatctttataacaagcagaatagaatcttcccccaccccctttttctaaagatgtaataattgaggctttttctagtggtatagctagtggctgccagatttagaatgggaaaagagtccttctggctccgaagcctggactccttgcaacacactgctgattttgaatggagtagacagatgtgtctgtctgtatctaggcacacacagagtaactgggacacaagagatgctggaaggattcccgttttgggtaatgaagtttcttgtaacacctaggttctggaattctttgttctataaattcctattaatagggagattgaagagttattttactataggtaaatacttaatccagaagtagcctgtgaagatagggcttaaagggaagaatagctgagtatacaactattctaaaaaaaatcggagtttagttttaggttaagctttttcttctgcctgcaagttgttgaaatagaaagcaggtgtttgctacaccaagtaaccttcactttattgaaaaggtcaaggagctctttctcattgtttgtttctctctcatgttcctttgggacgtatccctctccctttcttgtgcctgcctcaccaaagcatgcccagctaaaaccaaccaacacacataattgtctgtgtgttggagagatgaaaggtctgcaaatagtgaaaacccactgttgtgtaaacatgtcaatttatttacttgatttagacttatttttattaatgtttccaagtgtttttaaattgattgatttgagtgttatgtccttattttttatttattctctctctgtgttaatgaaaagtaaaatacataatgaaaataaccaatattggttatccaatgagcgatttggatggtccttgaataatttattaatttcatatgtaattgaataatttattgatttacatagccttgttaaccctgagttgtgtaatcaatcacttggtttctcatttttcttaccatttatagaattatcttgtgatttcaaagttagaatcatttttatttgataatatcccccatgacattccctaggccagccaggaaaacctcaaattaaatgcagaacgaccaggttcatccagttaatttccagagccagcacttagatcagcattgtctactgctgctgctgctaagttgccttcagtcgtgtccgactctgtgcgaccccatagacggcagcccaccagcttctgcagtcccttgggattctccaggcaagaacactggactagggttgccatttccttctccaatgcatgaa

SEQ ID NO: 64066 - DNA, 643 bp, Bovine  19866881039348
  misc_feature (1)..(1): n is a, c, g, or t
naaatttttcatcacaatttcttaaagtgggtctcctttcttttttcctaatctgttttcctgttctgtgtttgtgtttatgttttcaatttggtctgtgaatattttcttcaggttttgaatttttttcagtttctgtttccttagaaacactgtctctagtattatctttttacctttcttttcttctctgttttttcccacgcctgagattgtcctcaaacgtgtcctctcacatcagtgtttcacctctctgtagcattaagtatgctttgacttcaagtttccgtatgcttttttagcgcttctaacaacttaattcttttcatacattttagtttccgtgttctccattcatttttcatgcctctttactttctcttcatcctggtattccgtagagttaccttaaaatatctttttatttatgggatacattatttcacaggtttacttatttgaattttcaagttgatattttcttttccctgatctgaagaatttagtaataggcttagttttgcctttttctcatctatttatcttcaatgaggcacaaaccatttttgtatccagtgttaatcaggaatttttcactttttgaaaccacaaagcccgttgctggacctccgtcaggaggaca

SEQ ID NO: 64067 - DNA, 1544 bp, Bovine  19866881180724
  misc_feature (1)..(1): n is a, c, g, or t
natcagccatacatttatattgataagaaagttcttagactttggactcctcccagaaaatcattttttgctgaggctgtaacccttgtgttgtctttgtcttttctgcttttccccgagtcctcattgttagcagctctttactgatacctgtggattctaggccaggccagactcctatcaccacatctgatttatttcctgatggagtctgagagtacactaaacattcactttgagcactggaatccagaatattaaacaaaagttaaagccataattaaagtcagaattcatgaaatggcaagatagtaaaaggaaagtgcatgcttgttctccgttatcaggagtgccctgtcccagagcatgagacgcagagcagtggaggattattccatgctgccgtgttgtttagttctaaactgaggcaggggagaattctcagcgagattcaagctttctttatcgtgcatatagatatcatttcttggtatactttcacaattttcatttttcctgaacaaattattttcagtaacttttaatccccagtaagtaattttgaccatgaaatactattgatttgcactaattaaaggttgaatattcccagtaaatcactgtggaaaattttaatgaacaagccaaatgagtgagaaatcaatacttattgattgtttcctggcatataattaaagccaaaatctgttctcttacccagaaagcaaagcacttaaattgcctgtctagttttgtgcgagttttgcatctgtctacgtgtaatagacttttgttgccaaatcaacaaggcattcaaaaggaggtattgagttgcaaaatggcagctgtccttggttcatatttctcactgcatcttcataagttcacagaagtcaccagacccttcagtcatactgaggtatgtatgagtgctagaagagagctagagatgttttgatagaaagcaagtgatttttgtcagaatgagcttaagcttagtaattttctgttaattttaagaaaagtgagctgcttcctattttattttggcttttgagtaaaattcaaaagccagttgaactataaggtagattgtgatcttctggaagtaaagacagttttgacccaaatgtggaatataactccttttcaaggaacttatacaagatagctgtgttttgaaatgtttcttttgttttataatgtggttcgccatggagtcatagttacatagtttggaggacgccatatggttatgctaaggtaagatgactaaaagaataggaagttaggatggggggatataaaagtagaaagtgcacaaagtgatttgtatatgtagtgtgcacagtgggttcctgtggattattcaggatttcatttaaggtgaaatttattctatcagccaagaggtaaacaggatcaatcatgggatcataacatctagagaattaaaactcaaaaaatgaacagctgtttccagaactgggaccagaaacttatcttgtatgcatgggttctgaacaatctgccaaccatgttgt

SEQ ID NO: 64068 - DNA, 666 bp, Bovine  19866881684648
  misc_feature (1)..(1): n is a, c, g, or t
nttattccatgatgctcagatctaaatttgtgcactgccaaaggtttaggcacagaaaaaattatggcctgtgtgtgagagaaattaatatccctcttttgttatattcagtcttctgaacatttagggctttaggaatcaaactgttgaaaggaaccccttcctctgggatggcctgacttgaagcttgccccatgccatgaggccaactgccagcctgtggactggcctcagacctgctcctggttgacaggtatcagaagccgtgatggtgacgacgaggatagaaagatggttgagggaacttctagtggaagctttaatcttttaactttattcccagttgcataattgtgctttcaaatgcagtcctagctgccaatttacactttaccagggccaaaatttatttttagtgtcatttccatggaaaatgtgcactttgctcttgattgatagatgtattttgacagttaatacaggtttacccagtcaaggcttgttttagttgaaggtgaaaatagaagagaaaaaaaaaaattacttcaacagatcttagtatttctctttttattgcattcgttgtctaacaacaataatactcattggcaagaaatttatttacactaacaaattaaatttaatcacaggtatttttagattggt

SEQ ID NO: 64069 - DNA, 2075 bp, Bovine  19866880356697
  misc_feature (1)..(1): n is a, c, g, or t
nttgggtcatgttttttgttctgttttttttttttttttcctgcttaaaatgaaccaacaattttggcccaacacaatgcaatacccataagaagcatatctatattgtctgttattatttaacaaacaaaaatatatgtgagtggcacatttattatgccacaagaatattctgagaaatagatactagtcacttagtatacatatgaatggagaatcttattttttaataactccagctacttatgaatcccttgttttatctgaaaactgtcattcatgctctctcttgcaagtattatcccctttgtgaagttttactacatgtatagacattaatacagttctaaactctggaaagcatagcaatctgtattgcctcttgtatcaaatattgctgttttctcatcttactgccattggctctccacacacacttgtattttgataaatccatcttccattacagaatatgaaaatgtgagatgcttaatctctctaaatgtgctttccaaatgtggtcagtggcactcgagagagtctgcggggaagtttcaaaagacagtgtctagtattagaaaattagatattggcagataagtcatcctgtgaccatgagggaataaacttaagaatgaaagaccactggctaaggaaagcagagcttcaggaaggaatttttcagaatcttccatgacatgtgtgtcacagaattaaaccaacctagaaatgtgcacctccttgcatctgtgtctgacaataaatccctattttaaaggcaattttggtctcatgcctcttacttggttttgatacactgctctcatacttcatagatagctttctaatttattagcatgtgcagtagacaatgaataaatgtttgctaagttaaagcaacagagaatcactttcccttttatatctgcatgttgtccgacaagaatattggtacctacgacaggaaataacaggaagggaaatgatgccacgggcccttgtactgcacaaattaaaatcaccctatacaagtttacacactgggtctttcattttaaactaaaagtaaaatcattaaactaatttattacagtttacgtagattatgcagcagaagatttacatttactacattttattttagctactagaatgaataaaatgccataaactagagccaaatgctgaatacccattttagaaatgatttcttccattaattgctttcctgttctcaataattcactattatagagcagaaagcctattgaattatatggttgtaattaggctgtttctttaacatgttttatgcttcagtatttcttatgcttcaaaggaaaaaaaaaaaagaaatctgataacagctttatataaagctgtccttggatggcatttgtttttttttttttttttttaatctcagaaaactatcttgtactggaagtttgtccaaaattcaagttattctttgtgactccatggactgtagcccaccagggtcctctgttcatggaattctccaggtaagaataccccagagtgggtagcgagtcttttctccaggggatattccagagccagggatcaaactagggtctactccattgcaggcagattctttaccatctgagccaccagggaagatgtgaaataaaataaagaggtatttttcacccgttgatgtaggcagggaatccctacattaatgttttttgacattaattcaaaaaacaaataaacccaatcatatttttgaaaatcacacacacacacacacacacacacacacatatatatatatatatatcactgttatgactaatctaattaggactgataatttcccacgtgtaacagacacagtctcatttttttccctttagacatcagactttgatgtttcaatagttctttactttaagaattttgaatatctataaatgtcaatactctatatttctagttccattaaaaaggatgctcaaaaatctcatctctggatttccatataaaacaaaatccatacgtaggctacattccagtctttccacaaactttttctagtaaatagg

SEQ ID NO: 64070 - DNA, 1038 bp, Bovine  19866880818615
  misc_feature (1)..(1): n is a, c, g, or t
ntgtgttctttttatatcaacaccctttgggcaataatctacatctaaatctgatttttgtttacagttgtttttgttttctactcacgaggcacgtttcttcaaactcagtactccaggcagcagaatatattgaaggatctatggcaaattttagatgaaatagcttgatccagtgcaagtttcagaaaataatagggattgtaaaaatgaaaaaggaggagagaggctgagtgaagattttataaggcataaaaagcaaacttgtcatgtcattaggctgggggaagtgtctgatttttaagtggcctcaataaatattgttatatgcacttgtgtttattaatatattatcaattaatattttggtaaaattaagacatgtgattaattagcattgagatgtacctttaaaagtgttcttttttagcatatctataaaatttagcagatgggtggccagctaagtgatatatgacctgccttccttggaactaaggcattggcagggtttctttaaccatgtatgttccaaagctatctcttatagcacctaaaactatcccaaaatagatttgcagttgtttgtggatataatgtgaagtcactaaaacggtgctactgtggttaaaattcaggattttatgtaacacttactgagtgcacttgagatcattttttcattgcacataagttctctgatataaaattagcttttattttcatgtaattgctttcagccttaaaatgtatggcataggagagagtagtaggctatctgatctgaaatggaggcacaaaggaggtctatcatggaagctagtccttctgtgattaagctagtccttcttgggttcacctgtcagtgttaactccctaggtccagagatacttcctatggttgttcaggctgcacctctttcagaagcatctagcagagaaggagagctgaaataccaccatgctcaacatgctaggccctgcattctggggtgatgcttcatcagctataggaaaggactgtcattcctccagatt

SEQ ID NO: 64071 - DNA, 1430 bp, Bovine  19866880878829
  misc_feature (1)..(1): n is a, c, g, or t
naacccagggatcgaacccgggtctcctgcattgcagacagacgctttaccgtctgaaccactagggaagcccattaaccatgttttgacagtttcaggtagatagtaaaggaactcagccatacatatacatgtatccattcttccccaaactcccctcccatccaggccaccacataccactaagcagagtttcctgttaaataaagaattttgaatattttactgcattgacactgaacattgaatttaaaaataatgacttctttggataaatggacaaactggcagatgagtatcaaaattttgtcataaaacaataacgtttaatgccatgcatgaacaagagtagatcttaactgttcctattacacatgaaaagtggtaactatgtgaggtgatgtgtgtgttaattaacttgattgtggtaataattttgtaatgtgacacatgttaaatcatcatgctattattggttagtcactaagtcatgtctgactcatcctgtagaccttaaaaaatcttgttgtataacttaaatgtatactttaaaaataaacaacaaaaaaaagacacacataagaacaaagtatatcagtgaaagttgcattttaaaaaattgcatattatgtaaacaactactatggcaaactgatttcattgtagttgttttaataattttggctatgatgaactgcataaatggcattgcataagatttataattctcatgtaccagataaaatttgtaacatctactgttgtagatctttattgtgtatgtgtgtgtgtgtgtgtgtaggaagctgaaatcaattattttaagtatctagccattaaattccataattccatttttaatttatctgaattcttaagaatacctagcaagaacatgataattccatctgacataggagctgaccaatcttgattctttgcttcaagtaaggatcagcttccctatgacctcagagccacatgaggaaggaggaaaaacagatccattagaacttagtgtgggggaggaatcagagagggaggcagtgaaccttactccttccctttgaatgtctcagaatgatgtgttagacgaaaatacaatgatataagcacaaagggctttaaggagatttaattttgttgttccctttctctaatgaggcacttgggtagtttccattttgctttagatgtctggggaaacttttgttactattttttgctaattatacataatacaatggttgttttccccatttatttgtttttacccttttctcactacaatgctcttaaatatttatacatattataattcagcttaaagtcatcatcatgatacaacacaataatcttgacaatgtaaatcctactcctggttttagggaagaaaatcagaaacaatcaggtactgcagagatagttat

SEQ ID NO: 64072 - DNA, 2509 bp, Bovine  19866880946994
  misc_feature (1)..(1): n is a, c, g, or t
naatttaaataaaaaaaaaaaaaagttcacttctgctccatgccagtgatcaggatgcaaaataagaatgacctcagtttatttttcctttggaaaggttgtatttgttttgggtaatgcataagataattgcatttttaaaaagagacttctctggaaattcagtagcacttaagaagacaggagttggaatgtaatgaccattcagttgttttggctactcatcatctttctctcctgcagacagtatccctgctcattcttttaagtgattctcatgaagctgaacatcatagatcctgttgtcacctgagtcatagagacttgactaaaggggttagtgaaagtgaaagtgaaaagtgaagttgcgtccgactctttgctaccccgtgcactgtagcctaccaggcttctccgtccaagggattctccagacaagaatactggagtgggttaccatttccttctccaggggatcttcccgacccaaggattaaacccgggtctgccgcattggaggcagacgctttaacctctgagccaccagtgtctgaccgaatacggaccaatgtgattcttcctttggggaatttaaaacttttccagagaccaaatcttcttatgctgagttctccaatggaacattcaaaaacaaggtccacaggttatcagtattataatactgatacttcctgcacactcataacacttgtattttccagacactggttatgtacctctttctttagtttgtgagctgttccggtatccacctccttttggttctacatatacaaagtttctgttgcttttcttttttcctgttatttgaaattaaagaactttgacataatacctagcacagtatctggttccctgtatcacagtaggatgaagtttcttcttcttacaggacaattttaaaagcaaaaattaataaaaaataaagtaaaataaaatagaataaaattcatttactttgaacaggtttgtacttgcttagttgaatttaacacaattctttaagtgaatgagagccaaggagtagcggtaacccttctagcctcatttatcttgcatatgtactgttatgaagcaataagttcaaatttaaggttattttagggccagttgagtctcatgagtgagtcagactggaatagggaattggattagagtctcatgagtcagccagactggaatagggaattggattagaaatgttcttcacacacttatgttcagcagcctgcccacatttacaatttccatgttgaagaatgttcatggggcgtctcctcaaggaattgcagacaaacctccaggacatttgaaagaaccactccttgcactcctggagacacagctacaattgcagccagttattgggctgttccattataacaaggcaggtgctagtgctaaccagcccttaaaataatttgcagagtcactgagggtgcagtttgtttcctggatgacctcttaattgataacctcttactagataactcccttaactgataaacgttcaagagaaaaaagttttattcatcgaagtatggcctcactttgaattagagtttaggtgcttagtatttagggtttctctgatagctcagttgggatagaatccccctgcaatgtgggagacctgggttcaattcctgggttgggaagatcccctggagaaaggaaaggctacccactccagtattctggcctggagaattctgtggactgtatagtatttaaccagactatagctttgtcttttctttctcctctatttctttactaaaattttagtcatgtatataacattggataaataaattgttgtttctcaaattatgtataatttataagtattataaacataaaaaacaccttatctgttacaacactctaggagagtagtttagaaattaaaaaaaaaaaaaaaaaacactaaacttcacttgtggatagttttaaagattatagataatataaaaattgctttagaaaattcacataaaggcaagcatcatttctagataattttaggataacagaggtaaaaatcttaatttcaaaataccattacattcacattagtgtataaacatttttactccttataatattagtgttgagtatcaaccagttaaagatgaggactcaggtttcaagtcccaattttatattttctttataatgttgaactgaggatttattggttaaaagaaaataaaagaaggaggtagcaggaggaaagaaaggacaaagggaaaagaaacctcctttctaacactgaaattgactctaagacattatcccatccacaaattctctttgcctgaaatgatgtactatcttctacctagtcctagtgccattactgagtttctacttgaattaaatacaggtcagcttatgtctataaaattatgaaaaccttaccaaaatttaatgcataatttcaagtgttcagtttgtccactagagtgcaccattgtaatctcat

SEQ ID NO: 64073 - DNA, 2029 bp, Bovine  19866881017714
  misc_feature (1)..(1): n is a, c, g, or t
ntaatatagtagtagaataattacgacccccgattttgtattcaaagagacctaggctggaatattattagctgtatgactgtggcaaaatggtcaacttctctaatcttcctagccagtaatattattatgatattacttaaaacataagagtggtttttaagattaaaatagatactacttagaacaagtacttgactttcagtaactgttcaactaaactgagataccattattattgtttttgttattgttgctgttattatattatcattatgacctgtaagaaaattatacataatgatgcacataaatcaattaacacaaagcctggcatacagaaagcactcaataattatttgtttttgttaccgttatcataaaatataagatgcttagcattgaatgtggtagatattcaacagtgtcagtttccttatgcaacatacaaatatatctggggaggctgtatggcttaatgcaggctgctgttgtctttcatgctaaacagacctgtgtttttttatcactcctctgctacttccagtctatacaacttgcacagcataattataagcacatgaaggaaacattgtaaaagactgaaatggttgcaaatgggtgtcttcagtgggatactaggtgatttctaagcttgtcctcctaggttgtctgatgctaatggatctctgcacctctaattgtcttagagctattttacaactttgtacattgtagataacttgatagcaatgtaaattattttcccatgggaaagaaaatagtgcccagccttacatttaggtctataatccatattaagcttatttttatgtatggtgttgtataagtgtgctcagtcatgtctaactgtttgaaaccccgtggactgtagcccaccaggctcctctgcccatggaattttccagtcaagaatactggagtgtgttgtcatttcctccttcaagatcttcatgacacagggattgaaattgcatctgcattggtaggcagattctttaccactgaaccactgttagtgaattttctaatttcattcttttacatgtagccaaattttgttctaacagaatacaatttatttccctttctctctacagaatgcagttttgtatcaatttaagtgtgtgtgtgtgtgtgtgtgtgtgtggtgtgtggttttcaaaattttccttagaatcatttggaatatctctctggttccctgattaattaatgcataaaaatcactgagacatagtcattttatacctgtatcaggattacatgatattattatatgataattcctcttctaggaattaacctttttcacactcaatatatttcaactagtcttactaccaacactgttctaaacatttttttttcatgtattaactttagaagtcagatgtacaatactatgtgtgcttgagatccttttaaaaaactcataacaaatgtgctcaattcagtgtgccatagaaaaccaaggctacaaatgtggttaaaacagtatgtttagaatctctagttgtttggctatggtcaaatcatttatatttcctcttctaggaaatggaaataataatctctgccttaaaggattttggttcagattgatagcagtagtggagaagcagtcagctcagtaccaagcacttcagtgaacagtagtcattgttttgaaaattcagcatctgcccaggcaatccatttcagtgctcaacagttctcacacttacatgcaactctcattttgcctattggagctttctttttgcttatctgttttgtttggttttattatgttttactactttccacatgtccatggttctttctttcttcccaccccccccccgctttattttttctttttgatgcaaacactgtttctattctgagtatcttctccaagctaaatatgccctcttccttcatttgttcttaatatggcatatttcccagactctctatctttttggttgtgctgcagtttataaaggtcatcctccaaatatta

SEQ ID NO: 64074 - DNA, 1298 bp, Bovine  19866881127874
  misc_feature (1)..(1): n is a, c, g, or t
ntttgtctggaactctcttgctttttcctgatccagcggatgttggcaacttgatctctggttcctctgccttttctaaaacgagcttgaacatcaggaagttcacggttcacatattgctgaagcctggcttggagaattttgagcattactttactagcgtgtgagatgagtgcaattgtgcgatagattgaacattatttggcattgcctttctttgggattggaatgaaaactgacctttttcagtcctgtggccactgctgaattttccaaatttgctggcatattgagtgcagcataaaaacttcataaaaattgagaatctggcaacaactgagttcagttcagttcagttgctcagttgtgtccaactctttgcgaccccatggactgtggcacaccacgcctccctgtccatcaccagctctcagagtttactcaaactcatgtccactgagtcggagatgccatccaaccatctcatattctgtcgtccccttctcctcctgccctcaatcgttcccaacatcaggatcttttaaaatgattcagctctttgcatcaggtggccaaagtattggagtttcagcttcaacatcagtccttccaacaactgagtgggcatctataaaaatgactatggtattattaatttgtcactctatatccttgcttatagagaactagttatacggtaagcttaaaaaacatacatatagaaatcttaatactagatatcttaaattcactacctgtgatataatttatgtgtatattttttcacctatcattttcagaacaatttctaggcaatttggagtgaatgaaaaatagaatgaataaaataaatttgactaatgtactattaagctccataaactatgttgtactataataactacactatttaaatatatgtaatttgtttgatactatttcataaaatgtacagatgactacctcagaaaacgtgccctagaaaaagacaaacatatgctgtaatggtatggccactagtctgcgctgttgtataagaaatactcattttcaacaaagtatttctaaaatgaactagctccatttattctatattaagaatcacaactatcagatctcaggtttatatttacaattttctataaaatattacatgccaagtcaatttgggaaaatattaatataaagtcttgaatggttccccttttcttttaaattaaaaaaatggcatatttaatactataaaatgttgctaatttgtgaaatatgaagtatgttaagctacagaataatggctc

SEQ ID NO: 64075 - DNA, 1058 bp, Bovine  19866881208401
  misc_feature (1)..(1): n is a, c, g, or t
nataagcctatagtcctgagcagtcatctttttccatggaaacagtgctttataagattaattcctcatgacaattcacaaaatgaactttatacctaccaaagtgcattgcactaagcagggcaatttcatctctacctaacaccaaaagttacaaaggaaaaaagtaattggaatttccatctgtgatataagaaatgaatatggttttaatagaagtcattctaaaatacataagatatacatatttccatatatgtatacttcaagtacacttcttctaatttatgaccagacaataggaaaaaagatttagaagtccagatcctctagaaaatacaagctttatactgtttaagcacaaagacggggaaaagaatatatgcttcccgtaattctctatctatatgaaagatggcgactctaggtcaacttcatcttcagaaagggaagagaactagagtgttactgacctcaagaagtctgcaagtagggataatatttaagcatttctgatacttagtataagttaatcaatctctcttaattttattttcctcatttataaaatcagaaacttttacttacctaactctttggactgttgtcagtattaaacaaagcattatacataaaatgttcagcacaaaggttaatcatagaatatactcacttaagttcggctgtgaacaaatacatttcttttttgagtgatggaaatgttctggaattagatagtggtgatacttgcacaattttgtgaatatattaaaaagccactgaatttactttaaaatggtgcattttattgaaaacttcactgtataaattacccctcaaaaataagaatagctatgactgtattttttacactacatattaataaaataaatgggaataccagaccaccagacctgcctcttgaaaaatctgtatgcagggcaggaagctacagttagaactggacatggaacaacagactggttccaaataggaaaaggagttcatcaaggctgtatactgtcactctgcttatttaatttctatgcagagtacat

SEQ ID NO: 64076 - DNA, 1276 bp, Bovine  19866881411480
  misc_feature (1)..(1): n is a, c, g, or t
naagtctgacatgattttcccaattcttagaactgcttccaagatgagacactaaaaatcaatctcatgctttttcttttctaaacagtcatctatgtcttagactaatccatagaagagagcatagcaaaataaaatcattagaaagaaataaatgatactgcttatgttttttgacacagggcaggataattatccatagaaacacgctatctcatttcccatttctgacattagttcttgctgtcatatggagatataccatatccataatcacgtttggtttaagtaaaacaagaggctgcagagcttgatttctcaacaggaattgcagtaagaaattaaaataatggctcttatggcaaaagactgctgtgatgacagtaagctaattttccaggcttgagaatttcaaaaatgttttgacaaccaacagtgaaaagctttcatccttatttcactcttacactaagtgccaggtttttatgcatttgtaatcatagcttcttcaaatgcaagaatattagcattactgacttgttttccattatcacataaaggctcctaacactttagagtgtcctacatatgggtttaagcttcagtataataataataataaacttcagaacagagtattgtaagcctgaaggtgtcagcatagagatttgaaaaaaaatagaaaactatgcataatcaacaaagaggaaacaggaataggtgagacatctgtcattgtgctggttctaaataaaatcatttattaagtctcacattgacacttcaaataatagaggaatgttttcactttaatggatttaacttcagatattttcttttctttatttttgcaaggcaaaatctgcagaacagtgaaatatagggtaaaagtgtccactgtcaaagagatgaaggataatagactattttaatatttgatactaaagttgggccatcaggaatttataaatgttccatattttacttcagaacccatgaatgcactgttcacatgatacctggatgtcatttctgatatttgcaaagcaagattagaaaaatgaatacagtcttatcccttctcattactcatggtcaccctctgcattttaatagagaaaaatagccagttatgccttctctgcatgtaagactgaatggacaacaaacatgatgtttgagcaagaatgaaaactgagcttatatgaaaagactttatccatctaatgcataaacatgaaagtgttaatctggaacatttgaaaaccaaatttat

SEQ ID NO: 64077 - DNA, 914 bp, Bovine  19866880353898
  misc_feature (1)..(1): n is a, c, g, or t
ntattaacttcctttattaaaatttcataaaagagatggaagcttccagggaaagactaagcttctcctgggatagtcttagataccagctgggaccccccagggaaaaaaggaatacactgccatataaaaatgttttgaaataggaaaatatttaaattagataccatgtaggtgtctatccagtgatttttcgttccagcacattcatcaaggggagcggcaggggatgggtgtgatggtggcacatttgggggactggggtgtcttgctccccagagctctccctctgaaccgtctggagagcagaggggacctcagtttccctcatcttctgcctccacatgtgctcacacagctcgttgtgcatgtgggcgtggaccccgccgccaaggccatctttctggagcagtgcagcaagaaccgaggctaccgagacgccgacatccggggcttccggcccgagtgcggcgtgtgccttccggatgggccagaagtgatcgcatcagaggtcagcatgaaggcggtcagcaggcgggcggcagtgcagggcgtggaggtggccttttcccgagacgcgggtaggtgcgtcctgatactgggcttggaggggaagaggaagggctgaagcggcctctgaccaaacttcctcccagcatgtgccatcctgtgccatccagctgggtgcttggagctgcccagagtcatcacccagacccacacgttgctcacttctgcctaggactgattctgaggaccctcccactcactagcctttgttggctggcagaagagaaggggtaggtaggggatgttgagaggcactaacattttgtggatgacttttttttttgcagtattttattcttttttttaattggatgataattgctgttttacatatatatatatca

SEQ ID NO: 64078 - DNA, 1572 bp, Bovine  19866880454887
  misc_feature (1)..(1): n is a, c, g, or t
ntaattgaagaggggacacctggcggggtcaggcagtggacagtggacggagcagacgttgcagtgtcttctatcaagtgtctccgtttatgttttgattcaggtttgcaccttaattcagcagaagctcaagtccgcttgtcaccatgaagtgtgagcttgctgctgcttttgtaactgaccagctgtgaaagtgcatagctttctctctctgctctgccagagctggccatcccctgcttcatccgtatccttgtgcaagacagggtcatgtcgcagtccaagggtgccacttcctttcctctcccgtctctgcccagtagggaggtcttccatggccacacacaccacagggtatgtatggaggccgctggagggctttggctaaaaaaaagacatggagctgggaatccctgcaggaaagtagatgcaaggagtgaccgggtgcagagggcattcaaaaactgatttctgagagccccggactgagccagtttcttttaatagtcagagaaaggctctgtggcagctttccagttgtcaattttagctcctccaaaaggctgggaagaacaggccctactcgctgtaagagttagcaccaaaatagacatgttggggccttagttttttttcttttggttgtgtgtgtcttcttaaaacttaactagatttttaaattataagagtagtacctacatataatttttaagaaatcctaagtggtaggaaagactaaacaattacaaatttaaatgtcctttccttcgtgtctataagcctcaccctcccttctccccatttccagtctgatttttaatagcttactcactaccaacagtttcccaggtatcttttcagaaattctgatgtgcacacacacacacacacacacacacacacacacacacacacacgatcagagcctagtcccgcccccctctcggctcagcttcctcttgggcctcccactcggggctctaaccacggtggctcctctcctcatcctttggggtgtctcattatcagatcccacattgggtcaggctgccgcacggagctctcgcagcatctggtacctctccttgtggcgccttcacgtcggtatgtttccattcacctgtgtgattcttcactaaggcctgtctcactcactaggctgcttcttgagcacaaaacctctggaaactgaaccttccatcatagtcccagacctaacactgtgtccagcacattgtagtgtttaattggttgttgactgaaaggacaatctggttcacatctgacctttttaaattaagaatacactttggacacctttaatgtcagaacacaagacatccatctcattctgtttagtggctctatagtatcccatcccatggacagattgtagcttcataatcaatttcctactaatggattttaagggcatttctaatttttcactattgtcactgaccctgtttctttgtaaacttgtgtgcatctgtctgttagtaagtttatagaagggaaatcactgggtcaaaggttcagggtattataaaactggagagggaatatcaattg

SEQ ID NO: 64079 - DNA, 1671 bp, Bovine  19866880480075
  misc_feature (1)..(1): n is a, c, g, or t
ngtgagatttgtgctgagtttttgtttgtttttttgtttttcttctgatgggcaaggctgagtgagatggtaatactgtctcctgatgattgcgtttgtttttttttgttttgtttgttgtttagatgaggtgtcctgcacagggtgctactggtggttgggtgatactgggtcttgtattcaagtggttttgtttgtgtgagttctcactatttgatactccctagggttagttctctcataccctagggtctgggagttagtgctcccactccaaaggctcagggattgatcttggtgaatcaacccccttagaagcagtcagccctcctgttagggattcaatatcctgcgagcgctgagtgcacatccttcctgctccctcacctcttgaggtgctgtgtccttccctcttaaggtctcctagtcttccttgtattgtttaatttccacatatttgtgaattttccagtttgcctctgttattcatttttaatttcattccattatgatcaaaagacatacattggatgattttaatcttttaaaaatttattaagacttattttgtggccagtatatggatataatggggcttccctggtggctccagtagtaaagaaactgcctgccaatgcaggatatgttagagatgtgggttcaatccctgggttaggaaggtacactggagtaaggcttggcaacccactccagtattcctgcctggagaatgccatggacagaggagcctggtgggctacagtccatgcatgggttttcaaggagtcagacatgactaagtgactaacattttcaccttcataaagatgtagggatcaaatgggttggcatttatgaatgcccctagcaaagggccagttagtggcacccaatggcaaagggctcaccttgacttactttgaaaagtttggattttggcaaactaggaagacaagataccaaaaaaggggggaaaaagcacaatccagcttccaattcagaccttctcagccgtttaaagtaaacagctctcatgagtaattaccagagggaatgtgaacgggccatggagaccctagtcaggagggaatgaacaaaaaatctccaagatacaaaaagctgagaagccgtggtgatcaaagacaattttaaagacataggactcaaggtaaaactagtttaaaaggactgctttgtcagctccagcatatcttcaactggatgttgacaattacacagcttttttcattctagcataaaatttcaggcaattaaataaatgaattactgtgttggccacatccatctctgaagcccgtattcccttggggcagctcagacagtcctagaatttttgacatatgcagtgaattgctcaaaaaaaattttttttaaaatgaagtattaatgaagacagatctgaggtcaaaggtacctcaaaacaatgcaaacaccttcccctgaattactaacgctcaaaagctcccgagctgggatctcaggcagggacttaccatcagctgcgctgaaatactccgggttcacagaggcatacagcactccatttcccagcctgctgctatttctgccaaaaagatgaagtttaggttagaaaaaaaaaaaaaacccacacatttctgtttggactttcttccgttttatttgttctga

SEQ ID NO: 64080 - DNA, 3766 bp, Bovine  19866880597006
  misc_feature (1)..(1): n is a, c, g, or t
nactgccgcagtaacacaagccctccctcccccgcccgggcctcattcataaaaagccagctctgcctcagcagctgcggagccggcactgggtctgtgtctgcattttccaagacagagggacaactgagacaaagagccccgaagcctccagcccccaggggcctgcctctggggctcctgcgctgctcctcactggctccaggtccgcctggatcagcagagggcctctgcagagcggcttgtgggagcagggctgaagccatgcccctctccagggcatcttcccgaccccaggaatctaaccagcatctcctgcattgcaggcgggttctttatagctgagctaccagggaagccggctcacaggcccagggtggtattaaagaaactcccggtctgctgagtcactcgccgactctctcacctccctgctatttaaaaaataatcacaaaaaccaaaaatcgaaggttcttccttgttggcaaaatgggggctgccagtttatctaaagactgccaaactggggtggaggtggtaacaaacttccagaagaggtggagtttttaaactgtccactttcagcttgatagcaccatacttgaacttttcacagccagggcagaaacctctaggaggttatgcacaactttaattcttaatactactttttacctctctaaagagaacaacaatggctatgcctcattcaggtaggagtccccccacatccaacccttttccatgcctcccctctcagcacagcttctcccaggcccacctccttcctgcaaaggaacatgcctcgctcaaactcaccttcccttaggacagtcagaaatcaccatgatagatgagaggctatccattttctttagactcaaaactcttcttcaaaacaaggcccgaacacaaaggcatgttctaatttagcaggaatggtttcaatgcaagaattaaatagaggcagagtgcaagaaggggagacaggaataaaatcattcttgttgccctaataccagagctgtcttccagtaaactaagatataaattctccccagagacaagatgatcagcactattaactagtcccctctctgctcttgcaaaaaacacaagcagggtttcaaaaatctcagatgacaaggggtgcaggagagtctgttacactctcagagaatcctaactttaacaccagcatccggctatactccggccctgctcatcagggctggggcccaggcagccttgtctctgcccaccccctgccaggccccctgcccagatgggacagataccctcagcgccctcctgcacagagcatccatttctaacacgttctctcccctcaccgaaggcctcccttcccaccttcacccagggactgacagccaaagaaatgagaaaataatgtggggatagcaaatgaatcttgtgaaatacctggtctgtaattaaatcacaataattctagaacctcctcaagggcagcaatgtcaagataacaaactgagagtaaaataaacaagtcttatagaaattacaccagccttgacaaagagattaccttagtggctgctgcctggaatccacaatctttttttttaaattcatctcagaccttctggccattgtgtgagagttcccatgcagaaacctacaggcctgtggctctggtactgacagtcattcctgaggggcccatggagggaggaggtatatgagtcacacataatgcatacagatttagggagattttaatacctaaactgtctctggccccactcctaaacaactgctaatcattaaaaatgtgtcgtaagtccttgggtgtgggtatagttacccaaagacatggcaacgtccctaaaggaacaataaaatacaccctagggtgcacatcacttaatcaagcttcagttcagttcagtcgctcagtcgtgtccgactctttgcgaccccgtggactgcagcacgccagaccaccctgtccatcaccaactcccggagtttactcaaactcatgtccattgagtctgtgatgccatccaaccatctaatcaagcttgatccaaattaaatgggaggtacagggcaagatggctaagctctctgtccttcagcagcctcatctgtagaatgggtataacaatggagctgactcataggggagtcctaagaccttgtacacagtaagtgctcaataaactctaggtgctgttgctaagctcaccctcccgtctaaattctcagctaactttccagcacacagaacaaaaccctttcttttgttcttcctggtgtgatgatctgcctgggccagtcctccgcccctcactcatgggctccagccccatgacctgtctcttcttccttctctgccatcccataagcatcccatatgcatctgccaatcctgctggccctctgggatgccaactgctttctcacaccaatccccacctccatcccggtctaaggcacacaccctctgcccttgatcagggcacgtgccttctcctactggcctctctgcttctgtctgggccctagggtccacggtgaactcagaagccagagctgctcctctgctcagaaccccgccatcgcctgtcccaggcaaagccaaggtcctcgccgtggcccctggccctccagcctcctggctttcctgtgcccctttctttatgtctctgcccaaacaccgtctccctggagaccccctctgagcactctatggaaaagagagccccgcccagcccgccctgctttaacaaacgctccacaaggcagatgctcccggctcctggctctactcctctaccgagaacagcgcctgacaccgatcaggcgcccagtgggtgtcgggtgagtaaacagccctgccccgccacacacacagcccaagatcacccccgcctcgggagcttcctgccctggttctcctgccggcgcgtcccagcatctcctcctggctgactcacgctctcagagcaaacaccccctcctcggagagcccaacaccaaccgcccgaccccaccccacacacagagttactcatctgctcctgctcacagggcgaatcgctgtctaacatgatagctggactgtgatctatctgtgccactagaatggttccatcccggtgggcatctactcatcccggggcccccagcgcctacagcagtgcacccgaggcagggtttgtgaagggtggtggtgcgcacactgacagttttctaaaaggcaaatctgggaacgggacagaagggcctgtccttccccgcgtccttcccacacactctgaaggttctctttcaatgcaacaaccccgtcgcctgcagacacctccatgctgatgggctccatggtcgctggcagaagcactcaagagctggggcttatttatgcgcaaaggaaaacaaacctaagttactaaataacagctcgacatctgtcaccacagaggagcagctccacacacagccaaggatcccacacggcatggcctgtccaaacaccaggcgtcagctccccttccccctgagcgagcttcagcgtggtcatcacggctgcccggagatgggcttagaaaccagcgcggggaccccagcgcccagccccctggcctctgaggcactcaccactgtgcagcgggaacatcgggcgaccctcctaacaagaccagctgcccatcaggctgcacgttttgccgcacctgttgaatggtgctgtgtggcagcggggaagccaggaccacgaag

SEQ ID NO: 64081 - DNA, 1467 bp, Bovine  19866880618689
  misc_feature (1)..(1): n is a, c, g, or t
nttgaagataaaattatttcttttcacagtgataataggattacaaattttggtggagcatagaactgtggttaaaacattgttatctctaaactgggagctttcggaagcagaaatgtatttggaattgattgtaatacacaggtaatttgtcatcacatttaaacaagctggaacattttcaaaatatgagtgttacttgtctattagtctgccgatctagctatctatcagaagttgaactgcaaaaatttttgtgactgagatgacactgagtacaaaaacatgcatcagcatggtggcatgtatttagccttttttttttttgggggcagttaatcatgaataaaatttcagaaatgttaaagcctttgaaaatattttataaatcaactgaaatattctgtaatggaattaaattttcccgaagatgagtcatctaactgttggttgcattttggttacactttgttccaaacaaataattcaaacaaataagttggaaatagtcaaccaagtattccaggaatgaagcaacaacaacaaaacaaatccgtttttgaagctttttagtgaattgcaatgattgaaaacaatgctctaagcaggaagatattacatttttttctccacaaaagcaaaggacgcataatgagataccacttcacacccactaagacggcgatcgtaataaataaataaatggaaaataatgagtgttggtaaagatgtggagaaatcagagccttttgtgtactgctgatagcgatgtaaaatgatgcagctgcagtggaaaacagtctggggttttccttaaaatattaaatatagaattaccaaatgacccagaaattccacccgtaggtaaaccacaaaaaaacggaaaacaggtgttcaaacaaacacttgtacagaaatgtccatagcagcactatttacaatggcgaaaaggtataaatagcccaaatgtctgtcaacagttgaatggataaacaatgtacagtatatccataccatagaatattattcagccatgagaagggaatgaagtcttgatacatgctgggaggtggatgaaccttggtggcattatgctaagagaagctggaaacaacggtcaaacactgtctgagtccattcatatgaaatacccagaacgggtaaacccatagagacaggttgtaggtaaacggctgtcagggacggaggagaaggggtgtggggaaggactgcttaatggcaaggtccctttctgaggtgatggaaatgttttagagctagatagaggtggtggctgtacaacactgtgaagggagtaaatgccgctgaattgtacactctaagatgatgaattttgcttcaattttttaaaagtgaggaggaactgaacacattaaattaaatggtttatatgatttgggggaagggctcctattttttacttttttatattatgtttttaacaaa

SEQ ID NO: 64082 - DNA, 1546 bp, Bovine  19866880621523
  misc_feature (1)..(1): n is a, c, g, or t
ntcccggcacaattgacaacactaataaaaatagataacgtatttttaaaacctacagcagattgtcatggcaataaataattgtatcatgttgctgtcatagcaacgaagtctgtgtaacagagacaaatcaagcctatatggaatttttctaaatttaggtgtttgaaaagagttaaaatagcctatagtcatggagaggtgcattgaaaaatccttaaccttcattggaaaaattagttttagccatttaaaaaaactgaattgcttattatttttttgttctctttaaagtataaaatttactttcctttttgttcattatacatacatatgtattcttaagagctttcatgagcagtaaaagactagagagaatgctctctcactcgttcactctctcttcttcagaagtaatttgcaaggcagcatatcataattcttgtattttgcctggtagctaatgacacaatattaatggaataacaagtcacattagctaagccatgccataccaagttaatagctagttttcatactcttggctccgttttcttaaaaagcatttattactgcatgctatctagtgtgtcattaagaactacagactcccagagctaactatggttattctctgacacagtaaactttccctcccgacttcaactagatgctactgaaatgacaaataagtgacattgcccgaaaaagggagaatgatttttttttcacagatatgtaattattgtgctatttaaaaaaataaccaaatctaaaacaattacatgaaaaaaatcctgcagtttcccatgtaacgaaacaagacctctgttatttaaatttttttcttttctttggcttcaatgaaaaaaaatgtgtatttttttttcttctgtagagatttctgcaccagtgaggggctatcaaactataggaacagagttcaattcaaagttcttactacctacatactttgtgaacttgcaacatcaccaaacagtattattttgctctttaaaccatttagaaaaaagaaaatttagatcacattttaattaaatgagatagtaaggcaatgtttctaatgcatagcaagagctcagaaatatgttacccgttattttacttcaaatcaaagattgaattacatattcaacattgataagagactaaaatgatgagatccttaaacagttatgaagtagggggaaaaaactaatataagaattataagtaatgtattataaatcaatgactctaatgatactaatgtttttctttaccatgtagctttataaaaatttccatgatttatttttcttggatgaaactttattaaaaggcaactttcagagtgagcagactctgactttcctggggaaaggggggcgatggtgtcacagaaggacagcattcaccccgctgacgaccactggtttcagaggctggctccctggagcacgtggggcttcctggaaggcaggagacgagcctttggtccctgcagccccagctcttccctaaaaccctgctggctgaccataaa

SEQ ID NO: 64083 - DNA, 1841 bp, Bovine  19866880621893
  misc_feature (1)..(1): n is a, c, g, or t
ngaggtgacgttcgagttgaaacctgcaggatggggagtcagcctatgaagagggccaggtcgggggcagggaggtgggggtggagttccgggcagaaggagcggcaagagtctgaggcagcatagcctgctcccccctctccctctctcacacacactcagacacacacacacactctcagacacactcccttccttgaaaggccaatgagctagagactcgtgggttactgcacagatgggcaggaagcctcccatgagagaaacacagatggagcggggccaggggccctgggacacggggccaggagaggaggaagaacagaagggaggccaggccttcgctcccggctgccctggacagcggcagaggagcagccctcctgagcgtctcatgcgccccactcagagtcctgttgtccctgccgcctccctcatttctcacctccgagttgcccagggctgtgggttctacacgtttattgacatcccccgactcccccacgactctgctccagcccctggccactgtctcggagccagctaccaccatccttctccaggacgactgcaacacaaacatgtagagaacacgggcgtcagcggacttgccgcgtacccacaggcaggctccggctttcttttccaaggggacggccagctgctggtagaaaagctgggtccgcctatttctgagccacagagagcaagaaatccaggctcccttttaaaacttagttttcaaactgctttatcttggccgggctccctcctgatgtggagctcagccgtcccgccccgtccttccagagtgcagtaacactcctggcactccctctttccacttgtttaaggtcacactggatttatgtggtaggagatttttgcctttctctccgttcctggccgtccccccgttaacccacagttctcctgcatccggtgaggttttgacaacccctggaagctctcaggccaggatggtccgtccagacccagtcctgcaccctccagactgtgatgccaatttaggaaggtctgagacatcatgcgtccaccacaagccacggtaagcattcccatattagaggaactttgcgcagcaaatgtagccttgtcctgggcagtctgtgttcagagcttatacatgctttcaaagggacagggaagatgggggctgtgtctaggctgctacagttagggggctgaccccgagcagaggaactctgcctggcagctgacgatgtagggcagcctgtgaccaggagacctggattctgattcccactcagcctgtatcaggcaagggaggctccacagtttccccacaaaaggttaagcccttgaccactttaaccaccagctcccattcttatactatatcaaccaatctataaacatctccagtaactaatgagtgcttaaagtgattttaagcacacttctcaaaacaagaacgggattctgtatatgaaatcaatgtcagtatgaccctcttttctttcagaagggatctgaggtggactgctgcagcccaacagtgggttagtcaaagatgattagaaaaatcaatattgagagatcaaggacgaatcagactctacccgtgggctaacatggggctctacggggactccaaactaggctctgaatggtccagagcaatccaggacaatgaggaaaccaccacaaaagctgaagggaaggggaaactaggtgggctgctggtggaacgacaggacgtgaaccatgcagaaggctccgtgtgtttggcaggatggagaaacagcaagggcctgacggtgtgttctaacagagacttgacctgtgcccacataaga

SEQ ID NO: 64084 - DNA, 2215 bp, Bovine  19866880636876
  misc_feature (1)..(1): n is a, c, g, or t
ncttcctccttgcttgctggctttcctgtctccgagctctgcttttgtcacaatggcaaactgtccagcacctaactttgctaaactggaactcgaaactgatttcccaaatggagatcatacaacagatgattctcacaaacacttcaattatttgggtaaacttggatgtgctaagtagcttcagtcatgtctgagtcttcatgaccaaccctatggactgtagcctgccaggctcctctgcctatgggattctccaggcaagaatactggagtgggttgccattcccttctccaagagatcttcccaacccagggatcgatcccacgtctcctgggtctcctgcattggcaagcacgttctttaccactagcaccacctgggaagctccgcaaacgggggggcggggggcaaaatcaaagcaccttgtctgagtctactgaaacttttcccagagacccagcagtccactctgatgaatgcaaggtctcatctaatcctcataaggcagttgaagatcttattttgcagatgagggaagttcaaggtaaaagaggagaggagtaacaggactgggttgtgtctgactgtctcctttcttatactccaagctaaaatgacagcaacagatggtctgttggaacccaagaaggccttcagtatcagagaaattaaaaacatacaaacgttcagagagagagagagactgcatgtgtggtcctcggatatgtcttgaattattgagggtaacccccccaacccagacacacctttactgaggaacatcatctagatacagaggcaactctcatgggaatgttacatgccctttccctagcttttcatgctagaactaagtggggaccggcatacagccttatctgaaagcaacaattctcagtctcatgcctccttgctaaaagaaaaaggattcattcccacataggcatggttggctgaagccctttttggaaacgggctatcagagcttgggcatggattcagctatgtagaactcccatccattagaatctagcacatgtgggaatgaaaaatgtgcaactgctgtgtgtcatctgggccatcagcaaccatgaaagccacagcaaacgctgacataaatacaggaaaatcctgaagccgtttaggccaactgcacttttccagaagatgaaatgaccattacttttcccattaaaacggagtaaagctgggtagaataagcaggtctaaggcatcagctgggaggaactctgactcagggcaccactctgagagggaggggaggggagaaagtcaaactgagctttgtgtgcagacctgctaagcatttaaaatacatgaggtatttctgtacagtaagtccccaactgggcaaagtctcctccattttgcaggtgaaaaagttgatatcaaaggaacaagacatgttctcttcttgccccagttctcaaatagacaggcaacagcactcactatcaaccaaccttccaggaagcactacagaaaaaaaaatcacttctcctccttctaaacctagagacaaaacccttctcaatctctagaccaagacaaacttttcacagggaatgtcactgattcatacaagtggcggtggccaccgtccgtccttaactccctcatttgaaatctggagaaaaacaactcagtcacagctttggaatgcaagttataaaaacaagtaattcaccgctgctggcttctaataaaaggcaaggagcatctataagactgagttttctcttacagagatgtgtggtgggagaaagtgaccagtctgcgttctgaccgcacgtgggcgcagggctggtgagagggcgggactggactcgaggaggccttgagcactagccacggggcccttcctgccgcgggtcccctaggagacggggaagggtgcagaagagcatccaccgcccctgtctatgcctgcgcccatccaacactctcctttctttgagggtagcaggaaacgctttggggtatttgtcctgctgctgctgctgctgctaagtcgcttcagtcgtgtccgactctgtgcgaccccatagacggcagcccactaggctcccccgtccctgggattctccaggcaagaacactggagtgggttgccatttccttttccaatgcaggaagtgaaaagtgaaagtaagtctctcagtcgtgtccgactcttcgcgaccccaggac

SEQ ID NO: 64085 - DNA, 799 bp, Bovine  19866880639542
  misc_feature (1)..(1): n is a, c, g, or t
ntgaatcttggactgtacctaaattggttacctgctcttcgaatttgaggctggtttgttgaaagaggcaagattttcttgttttatacaaatataagttcactcataccaggagttgttgctgtctggcaggcaaagttagttgaggaagacagggttttattttgctatactgaagttgttcgagagttaattaaaacaatggctgtacagtttatctagtgtggctttcttgagatttcggagatgcttgtttgtaatcaactcctggaagtatccagctcccaagggtgattccttattctggatctgcagagggaggtggctgtacgcacacgctttcagcgccgcctagcgacaggtgtgccggaaggcgagcaggcgctcagtcaaggctaggggctcactcttggggggcttactcttggggagcggggggctggtgggctgaggactgctggacagagtgtggcatgctgggtaatctgagaagtgtggtgaaatgcaggagttagccccgaagcactttaggatgcacttccgctcattagcgtttatttcctgcttatttatgggttacaacattacttacacaacaaaacaaactctaatatgtagtatgctcacaaagtgaatcattttagtgttactattagcaaaaatcataataaaataagatcgttactagaattgttttaatgtgatagaagtgctgaaatgtctttctacctttgcgtctcctccttctaaaaaaaaaaaaaagaagagtcctgaaaagaatcatttggtttcctaccat

SEQ ID NO: 64086 - DNA, 2162 bp, Bovine  19866880656597
  misc_feature (1)..(1): n is a, c, g, or t
nactttatagaatgttaattaacaaccactgtcttttaaaaccctttatattgctaattagagacaaaattgagaatttatgtattttttctttatattttatatcattttaaaattactttgaaaattaacacagtatctttcttctcttcagatcctttttgtttcatgcattctctgaatgctctacttaatttctttaaacagcactctacataaagggtattagtaactctgtaaaaattgtgatgaataacttcccatttcttcctctctgcttagaaaaagattgtactatgttagtatcagtcactgagatattaagccttaagtggtagtagttaatttatttttgacataaggcttttcagaagaatacttttgttaaatgtttgtacttctccctttgttgtcacttaattattttttagtattactccttattaggctaaattattttggtatctctaattaaaaattaaatataatgatctggcttttaagaaaacatacagactaatgatcctgaaccttttctctttgctgttggcccagacattgcccgctttggtttcctaatttagtaacagaaataaaactatgcaggactgggcaggtttggtatgctggcatctagccaggaagcattgggtttcttaagtaaatggacctgtggggatttgaggaaaacacagattaagttacatgagctttgcacttcacaaattcctaactatttaaaggaacttggctaacccactgccacctaaataaaactcaattttgttgaaacacacacatactaaatgatgtattgtttcctttttcaaaattacccttatctttgtgcttttaatttcatatttttgtaaagttttaaaaagcactttctcttttaatagtgcaccaaaattatagttaaactctattcaattattttgtgcatttacaatacctttcaagggcttccctggtggctcaggtggtaaagaatctgcctgcaatgcaggaaacctgggttcgattcctgggttgggaagatcccctggagaagggaacagctacccaccccagtattctggcctggagaattccacggattgtatagtccatggggtcacaaagagtcagacacgactaagcaactttcaacctccatcttgtcacccagtgactggataaactggtttcctctattacaaacagcagatgaccataagcttcattattattttttttaaatttcagagcaatgttggaagttctttatgaacctattagccgtataggttatagctcatataaagagctatgcattctttataactctttttctccttcaacaccgctggcctcttctttggcttttatgtgcacctcgacaagttctggagaaggcaatggcaccccactccagtactcttgcctggaaaatccaatggatgcaggagcctggtaggctgcagttcatggggtcgctaagagtcggacacaactgagcgacttcactttcacttttccctttcatgcattggagaaggaaatggcaacccactccagtgttcttgcttggagaatcccagggacaggggagcctggtgagctgccgtctatgcggtcgcacagagtcggacacgactgaagcgatttagcagcagcagcagcagcagcagcagcgacaaattcctaggttggagagtttgcagtgatggggtaatctcttttttctgtgtgttgtttggttttagcaactctcttaatcctaatctccccatcatttgcttttcttttcagttgttttccaaaatcatttatacctgcatctaatctgacagagtcaacctcaaacatccttcccagctgccctttcccaattctgcttcctcagtagtatttagtctatttatcaccatattgctaagtaaacatgtctttattgctatccttactttttagtcttaaatactacacatcgatctttcactataggacatgagctttcacaccttcccctccccctgttcacttgtatgtttcctagctccacttcctgatatgatgacatcatacacatgccatgcagcatctggctgtgtaacaactatgatcacatttcctattatgtatattttctttttcggagttaaagtcatttttctcat

SEQ ID NO: 64087 - DNA, 725 bp, Bovine  19866880734245
  misc_feature (1)..(1): n is a, c, g, or t
ncctttgaaatatctctgcctttgtcaaattctttgaagcttccttgaacctgagttgtgttcagaaaactttatatctgatgctgcattctggggccccggctcctggacatccttggctctcatactgcccatcacccttcctgagccacctgtcaacttttgatttggcctttaaaattaaatgcaagtactatgaatggtatttctacctgtaaagattagaggcaaaaggatacttctgaagggagagtaaggcttgccccagggtatggaacagctcaaccgaacacttgaaaacatctgtattgtcactgtatggaggcgcaacggagctggtgaggatttctttggctttttctgcatgttgttttgcttgtagtgacattcctgtggacaaaaaaaaaaagaaaggaagtctcagtttctctttcacttcagttggacaggaatatagttgattttggccggggaatctaatgcggtgacttcacatatctgcatctggcatgtggagttgtttcagggcagcatgaaataaccatcataactggaagaaacagtcactggaagttctcaagataaaaatttttcctccacatgttctttttggaaatcaacagaataagcagaaactgaacagctctgaaacttcaccagtatcagatacaaaatgttataaataattataaaaaacaaaaggaatttacaaagactgcagcatt

SEQ ID NO: 64088 - DNA, 1454 bp, Bovine  19866880878969
  misc_feature (1)..(1): n is a, c, g, or t
nactgtagccctccaggttcctcggtccatgggattctccaggcaggaatactggagtgggctgccatgccctcctccaggggatcttccccaacccaggagttgaacccgcgtctcttatgtctcctgcattggcaggcgggttctttaccactcacgccacctgacagccccatcatatcatcaagtggttcttttctattcgagaatttttaaatgggcttcgttttcaaggaactgagctgtttactgtgcttgggcaattcccatgggccggtttgctgaggatgtagtcaaatgggcttggcagaccaagcacggggatggggtcagggtttcagtgggtgaggttgctgacactgggggtaagtccccctctctggactggccagtgggtagggggctgtgcttgcccacttctcctgcagcactggcactttttaattcatctccttccttctggaaaccctcctccttctaccaataatgcactcatgggaaaatagacttttaaatgatttacttagaaataagtcctggccacagcatcaagccgtctggactcagcgtccagggcctggtacattctctctccaccgcatgatgcttttaaaacataactctccccagagttgattgtgcttccacataaattatattgtttaggttgctggaagtttccttggctttctgcttatcactgcaagaacagtttgttccctgccgccgctgccaagcatgtaagcaaacatgtttcttcttttcgtgatgacaggcgcatctcatcgtcctgagaggaagcccctctcgagaggaggcagccacgtctgcacactccgtcgcctgtgccgccatagcttccgggaggcctgagcaccacggtgagagcaagagtgagccttccatgggggcagagtggccagctccctgcctggcccttgcgccctcggggttgtgggctcgctgcctttggcatgggtgaacaggcagagggagctatgatagttgcctcagagagccttctcggttaggtccagcagagccctttggtttctagcccttttcagccttcttctagacttgtattctcaaacacagcaaacccaaatgtagctatcagagcctcagagagttcatgctgggcttacagggaagcctcctgggctttcaaaggtgatctatttttaaagattgttgtggagctactgtggcaacagatctggcctgttgaaacgccagccttcaggctctcccagggctgagctttcaatcaggataaacttacacgtcttcaggattccaaaaggaagttgccacttatgagtcatatagtttttcttagccccacataataggtagaacagtgagcttgggagttttttagtctttcatcccagctccgagcatacagtatgcctctattcatggagaacatgccatcctaatgacttttt

SEQ ID NO: 64089 - DNA, 2116 bp, Bovine  19866880916877
  misc_feature (1)..(1): n is a, c, g, or t
nctttctttaagggcaagttttgcattgtttagtttttatggtggtggttctgaatttggcatttcctgtccataccaagacaaatttgtaagttaaacttaaaaaaacaaaccgtataacctaaatgtgaaaagcagtcctgagaaaggactttacactttacatgcaacctctgcatttaaaagcgtgtatctgtagtgcccttccgtcttcccatctcagcttcctggtgactgtgcagtgcgggcacgtccctgtggcagtgccgaccgggtcgtgactctgttccctgtgggtgccaaggttggggtgggtggggggctctccttccaggggctcctgctgcagccactccccagtccttccagttcagggagggctctttgacctcatgggaaatgtgtgctttggaaacagacaatgtagtttcatttccaaggaaaaacccacccgtttcaactggttaatgcaaaaaaaaaaaaaaaaaaaaaaaggcatttttcatcttactcaatgaaaaagtctgagaatggatcagggttcaggagaacccctgggcacctcccttcccccttcacccgccgacttacctgcctgtacactggcttcacccttaggatatgtgtggtagggagagggttgtctgcaccttcatcctgcgtccacccagactttggggttggggcccacgtgtctgttctaagggcatagactcatctccttatgtctctgctggctgagctaggctcccggccctgccctcccaccagtgtgttccagagaagtgatgcttcgatgggccagcccaggccgcatggtccccgaacctcatggaggaggaagaggacaaggtgatcccccgggggaaagtgtggatgctctgatcagaagaacggaggtcaagaaacaacacccacccactggagacgggctgcacggggccgacagaagtgtatttcagcgtgtgaacaggttggagatacttcaaaggcaaacaggactttggtttctttctctccgtgagttgagagagggagatactctttcttcagagatactcactgtggagcagagacagcctctggcttctgcctctcctccccgctccacccagatctctctgccccgaggagggcctggtgccactgctgtgttctcagagttgcattgaacaggcacatcaaattaaaacctttcgggcttgctcaccaacgtggtttcctgtacagtactcccctgaggggggatcacaagtagttatccatccgtttcattgatctattgtttttattaaaaagaaaaaaaaacccaaccatcagaggaagtgcagccagctgtctcaagaggggagatgatgggagatgatattttgattacattaatccatatcctgttagttcccttggcttctgtcgctgccactggtgaagtcactaatgtgaactaattacatttgctctgaaaagccaaaatttttaatgcgtctcagcaagaaaggttaatattatcaatttaacagcgtgaatgaaacatggtgtgtattgaactcgaactgtcctagaagcttggataataaaaacccagtggctgcttttgtagcccactggagaaacagctgctgctgaaagatgcttcatcccttcttcttctctttagtctgatgtgggcaggcacttctggatgctctctgttgaccgggcggtctggtgtgtgacatagcagaccacgtgacgaaaggtgcttccttcccttttatgtcttcctgactgttggggtgttttcagagagaaacacggatcgcctcacctcccagtgctaacagccttcccgttttaaaagcctctgaattatcaagacttagagcacttcacgtgtcggtcgtttctccggaaccagccagcccctagaggcagcattctagagagctgggtgttctggaggggcgctcccctccaggggtgtctgtggtccagcctcttgtgcccacccatggtccctgcggtgcccgccttggtgacgggcagtgaggatgcatgcagcctgcttggtgctctcggcttcttggaattggtgggtgccttgctctgctggcagcgtgtcgaaggttctgactgg

SEQ ID NO: 64090 - DNA, 4513 bp, Bovine  19866880969245
  misc_feature (1)..(1): n is a, c, g, or t
ntctccagtttgccagttgccactactctatactctactactactctatagagtgccagttgcactctatagctgtagcagaaaaaaatctacttctgctttattgactatgccaaagcctttgaccgtgtggatcacaacaaactgtggaaaattcttaaagagatgggaataccagaccagcttacctgcctcctgagaaatctgtatgcacatcaagaagcaacagttagaaccagtctgttgttctggttccaaatcgggaaaggctgcatattgtcaccctgcttatttaaattatatgcagagtacatcatgtgaaatgccaggctggatgaagcacaagctggaatcaagattgccaggagaaatatcgataacctcagatatgcagatcacaccacccttatggcagaaagtgaagaagaactaaagagcctcttgatgaaggtgaaagaggagagtgaaaagtttggcttaaaactcaacattcagaaaactaagatcatggcatctggtccaatcacttcacagcaaatagatggggaaacaaagacagactatttggggggggtgcttcaaaatcactgcagatggtgactgcagccatgaaattaaaagacacttgctccttggaagaaaagctatgatcaacctagacagcatattaaaaagcagagacattacttttccaacaaaggtccatctaatcagagctatggtttttccactagtcatgtatggatgtgagagttgtaccatgaagaaggctgagtgctgaagaattgatgcttttgacttgtggtgttggagaagactcttgagagtcccttggactgcaaggagatccaaccagtctatcctaaaggaaatcatccctgaatattcattgggaggactgatgctgaagctgaaaccctaatactttggccacctgatgcaaagaactgactcactggaaaagaccctgatgctgggaaagattgaaggtgggaggagaaggggacaacagtaggatgcggtggatggatggcataactgacttgatggacatgagtttgagcaaactccaggagttggtgatggacagggaagcctggtgtgctgcagtccatggggtcacaaagagtcggacatgctgaacgaatgaactgaactgaaactctctctattggctcctacacaaaaacagcaaagtagctgccatttgtcacgtcccctgttctgctgtttttctcatggtagaagaataagtatttgtatctatacctctctttcaaagtgcagggctgacataaaaggatgtgattttcaaaacatctgattatgatgctagtattttataacaacaagacagaaatgacactgccattaaactatgacttacaatcagttgtaacatgcactccagtttcaaagatgtttaaatgccaaaagaaatgtgcatctttgaatcaatgaaatgaggactgttacttgcctgccttctgaaagcatttcaatcagtgaccttttggcagtggtcccatatgggacctaaggcataaggggcctttccctccctggctcctgcctgcacactccactgagacagacgctagctataatagtcccactcagcagtgggttgggggattctggtgggacccctctcccaaccaagtgagcaactgtcagccagcaaccagttaacagccctattctgccattgctcagggccactgaaagccccttccccctccctattgttttatacaatcctgtataattcaggattatattcagaaaataattcaggaacaaccctgaatcctgactgagataagatggtttttgggcactcaagtctatcatctcctttgtctgctacccttctgattaaagtcatcattccatgctccaacaactcctctctcaatttattagcctgtcatgcgtcaaacagaatgagcttaggcttggtaacaatcttcctttcaatatgtgtggcaccatacagtaatacctttagcacaaagacacattttccagttcacttactttgagctacacgtttatcatcagccacttttcttttctttctaatagccatagctgggatttaaattttctttagaaatcagcctaggcctacacattgacttcccaagtctcacaatccactggcccacaactatcagacagacatacccaatcaattgatgctattccttctgccagacctgtccagtagaatgctgaagcacatgatcaacaccagatcaaagtgagaggaagtagaggtctgaagtggggactcagtcttccatttccaaaaggtgatgttcataaatttaataactggtatggcaggaggaccaatcaatctgtacagatgacaacgatgttggagttagctaggttccgaatgtccccagctgttacagatgttaacctttaggtgctgacaggtggggagctgtagagaggctagagaagaggcaggagctctctcagggtactggcttttaggaaataataaccattatgactgcatgagagtgtattagttgaaaaccaatcttgcccgtatgtaagctgcagcatcaaaaagctgtgaaatagaaaaacatcccataaagatacagaataccaaaactgaataaaatggaaacagaaaatctgaatagaattataacaaacaaataagttagtaactgaaaatatttatacaaagttaaacctatgcccagatagcttcagctgtaaattctacaaaaactttcaagaaaataataatgtgtattttttgcaagcctcagaaaaaaaggaaagggaacactttccagcttattctatgaagccactaatatagaatcaggaagccatttcctgataccaaggccagacaaagacaacacacaaaaacagcaaaccaataatgcttgataaatatgaacacaaaaaatcctcaacaaaatatatgcaagccaaatctagggacatataaacagatgataagctatgactgagggagattcatcctgggaatgtaaggtttgcttaacatatgaaatcattaatgtaatataccatatttaaaaaatagaggaggggaaaactgcatgatcatcttgatagataaagaaaaattatttggcaaaatccaacatccatttatgacaaaaacttcttcaacctgataaaagatttgattttaaaaacttaaggtcaaacatcacacttaatggtgaacatttgcatgctttcatcccaaggctggaaacaaggcaaggatgtttgctctcaccgcttgtattcaagatgggaatggatgttctaaacagtgcgataaggcaagaaaaagatacaaaaggtatgcatattagaaaggaagaaattaaaccttattattagatgacatgatcctatatgtagaaaatcctaagggattcatactgaaaaacaaacaaacaaacaaaaaaaaaaactactagaaactactgaacaaattcagcaaggttgcagaatataaaagaaacaagaattgtatttctatttaaaaatgaaattaagaaaacattttcattcacaagaaaaacatcaaaaaaataaaatattcagggataaacaaaacaaaaaagtttgatttaacttttttaacaaaactttttttttggatttatcaaaaaagtacgagacttttacactgaaaaacactacttaaaatagtcaaagaatattaaataaatgaagagacgttgcatgtttatggactagaagccttaataacactaaaatagcaatacttcccaaatattgaactatacagttaacgtaacctttatcaaaattccagctgcctcttgctgccccctagaatctgaccttaaattcatatggaaatataagagacctagaagctaaaatgatcttgaaaagaacaaacttggaggaattatatttccaattaaaaaaaaattactacaaagctaaaataatcaaaagagtgtggtgctgacacagaactgacatatagttcagtgggatagagtggagacccgccccccttcatcccaactcgggcattcccagccccttggctgcatctccaggctggggagcctgatgtggagccgagaaccttcacaacagtgcaaggacttctttcatatcactgttctccaggttgtgggtctcccacccagagggtataggatttgattttatagtgattgtgcccctcctactgtttcgttgtggcttctcctttgtccttggatgtggggtatctttcaaactcatagccccctcagagtaggcccccatggagaagaggccatgctgccaactcacatgaggggctggcagttggggtgatgaaggtcccactgccagcgcccagtgcccctgatctgtatgcccagtgtgtgtacccagtgtgtgtctcaggccaggttgccagcctcctcccgcaggaacaggcctgtggcagaagctgtacctgggaggcaccggttccagagacctagtt

SEQ ID NO: 64091 - DNA, 2791 bp, Bovine  19866881007242
  misc_feature (1)..(1): n is a, c, g, or t
ngtctccttttttctgtttaagggaaaaagttctttgaaagagctcatcactaagagaatatttagattctcattttgactttgccacatgtaaatatgatctggtgaaacttcagttattaattcagatttattttacttcagagagtcttctttctctaataaaataaaatagaagtaggaccaaagggaccttcaagtccaatccagctataatataaattcttttgtccagaaaaatgagctacaatgcacatgtgatgattgcttttccaggataatttttagagaaatcaatgccacagatagatctttgacaagatggagatagataaaattacagtagatactcttccccaaagtcaatacttaatagtcttcacattttctctgctgattgatagtattaatttctagttgctatggttgctgaatttggaagctaacttactagctattatatgggagaatcaataaattaggataaatgtttatttcccttgtaggagaaaaataatgatcaatcttttacaaagtccttggccaatatgctctgggtaggggggggaagtcttcatgtgataaaagagaaataaatcaaagagtttctggattttaaaaatacatatttctgtaatatacaaaaccaacttcaatttcttgtctttctttttgtcattaagtatgttttattgaaggaagacagagctcatttaatagcccctaccccaatggccaaatctcttttaagcccctgctgcaaggagaggattgcagctaaagaaatgtgtttcagtacgaggtgtcctagccttctcagatgacaaatggagatcaaaataactgcttctaatacctgcttcctaggatttttgtgtgtgtgcctgtttgagagtattcaatgtggaatccaatagaatctaaatagaacctgcactctggagcacatgataatcacccctgaaatattatccaccattattatcatcttactattatcttcttacctcccctgttggtgagctctctgatccctgaggtgtgtcatttgatagttggactgttttgaaatctagaatgtacttctttttataatacttcgaaagaaagaaagatcaccacccactctcacagaaaacaaacaggcactttcttaaattggggaaaaatataagtgtagagatcgtggtatgcatgggaagcctggagtgctgcagtccatggggttgcaaacagtcagacgtgacttagcaactgaacaacaataacagaggccattgcagccctcagcagaactattggagttggccaaaaagtacattccagttttctgggaagatcttgaatgaactttttgaccaacccagtagctgatggccattaagaaagcagcataatagatagaattacttttcccagagagaactccacaaatcattagttaccagatctccattggttactctactgatgtggctgacgaagatctgtctagtcaaagctatggtttttccagtagtcatgtatggatgtgagagttggactataaagaaagctgagagctgaaggactgatgcttttgaactgtggtgttggagaagactcttgagagtcccttggactgcaaggagatccagcccagtccatcctaaaggaaatcagtcctgaatattcattggaaggactgacactgaagctgaaactccaattctttggccacctattgtgaagaactgactcatttgaaaagaccctgatgctgggaaagatttaaagcaggagtagaaggggatgacagaggatgaaatgattggatggcatcactgactcaaaggacatgagcttgagtaagctccaggagttggtgatggacagggaggcctggcgtgctgcagtccatgggattacaaagagttgggcacgactgactgaaccgaactgaacataagaggtagtagagaaatacatattgaatgaatgggtaaatgaataaaaccctgaaaagagatggtaaagaagtatgcagagaacagattaagaatttaagaaatacaagctccttgagagtagaagcttcatctgctttgtgctgtgttccagtgctgagacctggcacacaggaggagctcaagaaatacttcctgactcatgggaaaccactttagcaggtcaacgccacaaccagtccgtctagtacacacttgtcaaaggtcagggcagactcctttgttcctttgtgcactcattcagcaaacaacgtgtcgactgtgccctgaggtactgcatcactcacactgtgaaaaggcactgtcgtgtattttctcttgtgccaaactcctcagagcaggaatgcaacctcaagtatcctgcttctcagtgaccagggcacgggtataaaaagaaaggttccttacctcatgactgctggcataggacttggctttctcttcagagaggcggagtttctcccgaggaggctggaacagtgctctctgaagcagctggttttgcagtttctttctaggtgttatgctgacggcagcaacaatttcatccaggtggttggatatgtgagtttcctgtgattcttgcatatttttatatacattaccctctaatttttaaataagaaaacaaaagtattaatgataatttccaccattacttttagaaatacatatttttcctagaagttggtgttagaatttaagaaaatttcaacactatacccatggcttctttgaaacaagtagcttctatccaaaaagctcctagtgactagtactaactt

SEQ ID NO: 64092 - DNA, 2162 bp, Bovine  19866881008173
  misc_feature (1)..(1): n is a, c, g, or t
ncgtgagaagaggcctgtttagagtagaaggcccggaaggatttatggagggccgcctgctgaaatagagcggtcattaaggagaggtgagcagccgttggaagcgggagtatttggtaatgacatggcacaaatattggtcagggaggcctcctagaatgtactgttttctgtttgctttgtaggggaggagagtctgctgcctttttttggaaaatggggattaaaagatgtgaatttagtgcctgtgagaagcagaggaaaggtctggaagcagaagtccttaactcggccccagaggcgcaggtgggcttggctgtggccctggaggctgctgctgggggccaagtgttcgggcagaggcctgcagaggggactggccctggacacccacctgccacccccagagcctgggagagacttctgatttttccatctagcttgcacttcatttcacctgcaaagatcagcaagacaagcttttactccttcccttttaggatttattttaaaacccctaacactctcaaaacggctttaccttagagtctaagtcttagacagattttcgtgggtgctccttgagagaatttgcaaactcttcttgaagttcttgttacttttctgcattgactttcccccagacatgggtagctgcatctgtaataatttccttaataaattcctgcagttggaagcctaaagtgtcacagtcatgttgtctgcccaactcccctttctttagggaacatcccctccctcctctatatgatcctgctgtatgtcagtcaagggactctcacctccctccagaatgatgggcatatgacccagggcagacatgctgactggtctaggaagaacacatgacccagacaagcataaaaggagtgcccttgggaaatggatgcaggttaatttgaaaagagacgtgctttctcctggagcagttaagctgggccatctcacctggccacaggagggtcttgtctagagtaggagagaatggtgccctggcacggggaaggagaatgcgaatggggaggcagagggatctgaagtcattatctgtgccctgggatgaagctgagcttagagtcagtaacactctggggcattttagttgggtgaaatcccctttgggtgtttaacctcttctgagctgtgtctctgtcacttccaacccaaagttcctaatacattaagaaaataaactttgtagaatggaaagacatttcatatctccaaataagcatttaaaatattgctttttgagtttttttattttcctttacttccaatggcccagtccttcctttgccacgtgtgcacctaactcaggtgctcccaagtgctcctcctctgtcctgttgcatggtgccccagcttgcaaaggccgagcagctgcagcagcttgaggcaaccaccttgttggtgatgaagtgcccgttgtgagaagggacatctgcaccatgacgctgtgccctggtgctcccaaagctggcccagagcagtgcaacagaaggaagttacctggaggcagtgtggtacagtggctggcagcgtgctttgtggagccaggataaccgtagtccaatcccagatttaacacttaacaactgtgcaagtttggcccagttccctgtgcctgaacggcattatctgttcagtggggctgataaggatatggaatccacagggctggctgaggattcagtgagttgttattattactaattgaaccccagagcccagaagtgggactacttaggccagagcctcacaaaaatcttttcatgaaatcccctgtcttatctgtgctactttggcgagtcccttaatgtctttcagcccacttttcctacctaacaacacatccctcataggaatgtgtgaagtctgggggaaaccgtgcttgtaaaatgtacataattgtgaagtggacgcagtaagcactcaggacacatcagctatcaggatgcaatatagttcttgcccagcaaattaaaatggacccacctcagtggtctctgcaaagcgcaaagctctcctaggtgcttggagtggcaagtgtagctgggcctgacgtgggggccggaagttctgctctggtcaagggcctcaaggcttcggcgcatgcccctgaggatggggggctccat

SEQ ID NO: 64093 - DNA, 1499 bp, Bovine  19866881009755
  misc_feature (1)..(1): n is a, c, g, or t
nctggagaatcccatggacagaggaagcctggcgggctgcagtccacagggtcacaaagagtcagacacgactgaagtgccgagccaggagcatgtggactggagaagcaggggagaaaagaaaaaacacatttgttctgcctgaaagacactggtccattgcagaatttgaaattcagatttttccatatttacttaacaatgtaaagttacagctgattcccatgtgttttctgtttagtcttggcttcgttggagcttgtcaagcttagagaagagggccatgaaaactctgattgcaatggtgtttccatccaccacagctcagagattctgagcataaatcaagggcccactgctgcagaggagcccagagcagaggtgttcaggaggctgtgcgagcacggccccaggaccagccctagaatgacacccatttgtcaccgtaccttgtggtcttctccgttatgggagagcccgggtccatcatcctgagaagtctgcccacgagtagccacggcctccttggaatgtcctgggtgagctgccctccccaagcaagacagtgaggtcagcaaatggagtgactctcaagggagcagacagacaaacgattactaatagaagggggaccccttatgatcatgtaaagcgtggttccccacaacccagttccatcctttttgatcttcaccctgacatttgctacgtgccctcctaggacaggaacacctgccaggttgttgggagagcacctctactcaagcatttctgagctggaatttagatctattctcccagctgttcaggcattatttggagtcatatttccccttctattcctcagccctcccctttgcgcattggaattcctactcacaagagagacatgctaatttagcctccctctgcatcctaccaaacaagcaccaacttggaagggggtaactttcttatcctactgtataacctcccaacacctcaaaatccatatgtgaaggtgtggtggggggttcagataccttaggcaaagaatgggcagttttctatttgagctgaaaagacaaatcgcatttttcaaataaagaatacatgtactacattttacctatataaataaatatgtacagtttcatttccagacatcataaatgaccaaaatttggtttgggaaattttaattataagcatttaaaaacaccagccctcattagctctctgtgatatgtaaggattttatacaacacagtactaattgcccatgtactttccttcacaaaaaccagccttgctcactactgtatcctgatcacctggacagtaagaaatgttgagaaatgctccgttaacagtgatcagctggatgagggaatgaagtagatcattcatcacacatcttcttcctttcctggtgtgtgaacctttgtttttcacgtgttatggacacgtgcgtgtgtgtgctaagtcgcttcagtcatgtctgactttttgcaatccca

SEQ ID NO: 64094 - DNA, 1974 bp, Bovine  19866881030622
  misc_feature (1)..(1): n is a, c, g, or t
ntgtgtccgactctttgtggactgcagcatgccaggcttccctgtccttcaccatctcctgaagcttgctcaaactcatgtccatgaactcggtgataccatccaacaatgaacaacagcatacaactcatttaagaataagaaagggcattaatctctggagatctgagtccatgctcagaagctcaaaagtgaacgtctgaaattcacagcagtggtgcagccagggggctttatagcaagcctggttctgagctccattaacatataatgtggcaactacgtggctttggtggcaggagggggtgagccggggaagaaggggtttcctggggcctgagcatcagtcaggagtgttgctgaccacccagtaactggacaccctgtaggactgactgccttcccacccctccagtgtcagggcagggccgtgggacggattctgaccagtgagcaaaagtgagttgtgacactctcaggccagagctggctgctggcatgagtccttcaaaaggtctccatgaaacaaaagccggcaagtttaagaaaaaggctgcctcatccatctggtcctggagagacaagaaggcacagacccccgccacgatgggcgtgtgccatgagccaaggaggaaccgctgctgctgttggccactgagatttggtgggtatgtgccaggcataacctagcccattgtggcaagttcaaggcctaagttattctcaataatcctagaaaaactacctgcttttccttacagctgtggccaagatacaccagtctcaggttcttggtgagtctgacctaagtctccgggccagttcttccagcaactgtggatgacctgggccccgacttggaaagccctgctgccactcacggtggggtctagccccagctgtaacagttctcgctcatggggctgtgatttcaagccaggctgaggaattacagtgaacaagtggcctccagggaaggcttcccctggaagtgtgggccccacttggcataaaaagctgttttcacacttggctttattttttgctgtgagatgatagcctcctctggatgtggagccgtcagggagcaatctctctccccaggaagacatgtgtcaagcaggacgctgagaggtacgtgcagcctgggcctggtctcctttgtctgagccccgcgtgcgtgctccccacacacagtgtggaggggccctaagtgcccgcgggctgggcagggcacaaaacgagcatccgacagctcctggccagcggcaggctgatgaggaggtggtttttaacagcctcctgcttattgatttctgtgtggtgaggtcaacttcagcctccctcccatggagagaggctgcaaaaccaaagcggtttggtccccatctatttcctgcaggctctcggtagagtgaccagctccctgctggctgtgaccttgggcaggtcgccttgcccaggtctcggttgctctcacatccatgtcccctggcaattacatgcgctggaagcctgactaaggaccaggcactgcctcatgtgactgacacatggtcaggccttccatcctcgcccagctcccttagctgatcccggttttccaggtgaggacactgaggcacagggaggtcaggtaacgtcagtgaggtcatagagctggtggctctggggctcagcacagtgcccggctctgccacctgaacgctcagctgagcgttgcccaggccctttcctggggcaccgccgtttcctgcttcttgtgtcctgtgccagtttgtccctagcctttacatcacagctcccccatcttattccctgatggggaacctcacagcgggatgggcactagctgggcgcacagccaaccagagacctgacgggctggcctccctgcagggttggagacctcgcctgggggtgggcaggagctgccaaaggaaggctgtggcactgggtggcagggcacggtgg

SEQ ID NO: 64095 - DNA, 1881 bp, Bovine  19866881040582
  misc_feature (1)..(1): n is a, c, g, or t
ntaagtcgcttagctgtgtcccactctgcaaccccatggactgtagccctccaggctcctctgtccatgggattttccaggcaggcaggaatattgaagtgggttgccatttccttctccaggggatcttcctgacccaggtatcaaacccacacctcttatgtctcctgcactggcaggtgggttctttaccattagtgccaactgggaagcccaatactcccaattccatggactatccaaaggattctgtgaccaagatgctgcaagaaaaaaaaaacgtatctttcatcatctttactaccctgaagtaagatatttaaaacataaatgtaaatggtaagatactttaaagtactattgggtttagcagaaccacaggtctacctacatgagcaccatgatcataataccaaaaaataataaattaatacattaaaatattccctgtaatttaaaataacttaaaattatgtccattcttgttttttaaaaaaaaaaaaatttgaataaacagactcacagttccacaaggtttggaagcttctgagcaaggttttctggctgaaaattaaaaactcagaattaaattttatttttgaaaaatgtataaacatttctaaacagcttaaatacaagtactaccttttgaagggctgtaaattttgagaaaatgtgaaaataatacatcagcaggtctgggtttatgcttacatagatcaaactacaatttaaacgtatacatctgaacactgaaaatccatatcccttggagaaaccagatcttatattccatggtcacagaagaaataaaaatgttttaacagacacagagggaatagcaccatgtgacgctggggccagaggtgggagggatggagctacaaagccaaggaacaccgctggtaaagcatcccgccccgcccctgggagctcagagaaaggaggctcttcctcaaagccgtgagaaggaaccaaccccaaccaacaccatggtttggaacttctgtcctccagaactgtgagacagtaaatttctgcattttaagccacctagcctgtgtaattcgttacagtagccctaaatataatactatcaaccccttgtcaaaccaaaatcccaaactactcctgaggagaaaggaactgaaatcgcagagggccagataccaagatataactaaactcagaataaacagagtaagctggagctcaggtgtcctaagggaggtcacatctggaccaggttctaagttctgagtaggagtgtgatgtgacaaggacaggaagcaggccacagggaggaggggaagggagatggggctaggccctgggtagaaggaaaagcctcctgtcagcctgcgtgtctctctctctctcttctcttctctctctcacacacacacacacagacatgaattgtcaagactgaaagagcacactgagtcaggagtaacatttttttattctacactaaaacatactgtagaattaagctagatatcaataacaaagaatcaggaatggttttttaaaagcaattatgactaacttgaggcttgaaagacttaactatcagaggttgctatggagtagggaggaggagagttctggttagctttctaggcacatgaatcaacatgtgaaaagacaaaagagagacaggtgtgtttaagaaatcacaaacacagtttgttctactgtaactgcctggcagcactcatgacaaaatcttacatttcaaaagcacttataaaaataattgtgtcaatagaaaaataaaagtttgggggatttgtaacaagtaatttttcttacaggagcttaggaacagtgattatcattaggaaaaggatagtgctgttattctccatctatttt

SEQ ID NO: 64096 - DNA, 1280 bp, Bovine  19866881061545
  misc_feature (1)..(1): n is a, c, g, or t
natgaaaagtccttgaagcaatggtatctctaaatgatcttcattgaggtggcaggaatggcagtctacacagccctggagaaggaggaggagaggcatggtgaaggccggggctccagaggcagggtgctggtctggctgtggctccctgggcacacaggaaccttttgcagctctgccctcagacttgatgggcaggcaaacccaggagtgaatgaaagttcccttcatggctcttttcatcctggaatcaaaaagggccgctcagagcccaggtcaatgagccgtggtgtgaccgcagacaggcagccacctcagagatgaaacacaaacccaggttcctgccagaatatcccgccgaggggtgagcggccaccgcacaccgaggagcaccgccaagttgcccaggccatgtgctaaggccccttcactgggctgagtgttttgggcccttagggctctgtttagcactttgtcctgatctgcctgtgtttgtctctgtttccctttgctcttattttctcccccagcctgggtctcctcctcctcctcctcccctcctgggggaggcagcataggccagtataaccattctagtctttaaaaccacaggcaggacgctgaatctcggctgggtgccttaaccactgaaaagaattcatctttactatgtgtttgaaagctttacctttaatatcctttccaggcctgtttcctcatcggtgaagtaacattagcacctgccttacaagtttgttatgaggattaaatgagacaacccagaaaatgcccagcacaaaaggttgccacttagtaagttcttaatacatattagctatcattgttcacatttttattaatatcatcatcattggaatagatgtgtagtcatccaaagttttaaatgccctgctttgaagaacaatagtcactcaatgactagtttgctgcatgatattagaaaaataagcctccttaaaaaaaaaaataactcccatatcattacaatcccataccaagttaaggagatgacacttcagtttgaacacaagaagggtaaagcagttaaaattgtagtaataaaataaacatcagggacttccctggtggtccagtggttaagaattcaccttgcaatgaaagggacgcaggtttgatccctgcttgggaaacagatcccataagccacaggcagctaaacctgggagccgaaactgctgagccggtacgccgagactagggagtctgcatactgcaaagaagggtcccacgtgctgcaa

SEQ ID NO: 64097 - DNA, 2686 bp, Bovine  19866881062248
  misc_feature (1)..(1): n is a, c, g, or t
nggaggtgggagtgggccgggctcagaaaatggctggagatgctcagctgtttcagtttgaaacctgcaaaggcagattcattcgtgtgcttattaaactgatacttagcacctacgctgtgtcctgtccctgggtagcagtgaaggagatggaatagatttctcctgggatgggatgaggagacagacgataaacagaaaaataagctagagatgactccccaagaggaatgtaagaaatggggcgctgtggttgaaaggcaggcgtgctggggtgggtaggtgtgtggctgggagggtggtggtgctgttaggctggggagtcagggaagcctcgctgacaagggttgctgggggtcggccacaaggaatcaaggaggcaaaacaaggacagaaggctgtgaagcagatatggactgatgaccaggctggaccttggcagaggggggaaatggtgtgtgaattagctcaggctgtgatgccaggataccagagccgaggtggcttctgctggagacatttgcttctcacacttgggaagctggaagactgagatcagggtgccagagcatggtggggtcctgggggcatctcttctggcatgtagatggctgcctctgctgcgttcacacctggcgggggagagcagctgtctcccaggagaacgctagtcctgttgtatcaggcctctaccctgatgacctctttaactctaattaccttcttaaaggctgaccgtccagtacagtcacacagggctgttagggcatcgccacagcagtttggtggtcggagggtgggttgggacacgcacatgtaagcgaggccatagctctgagttccaaggcgggctgaaccagagcaggtggagcctgtaggctgcggcaggagtgacagcttccgtgacatcagcggggagccagtgatgggcttgaaacagacatgctcgggtgtatataacgacatgctagctgttgtgtggagaagggaccagagccagggggagggcagtcggagtgggatcaggggcaccgatgagggagctgctgggataacccaatggagacagaccggggcgtggaccagagctggctgtcaacctgaggatgagtgacagctgggctcaggtaagccttggccggggggtggtcttgtgcgttgttgggggttcagcagcacccctagtctatgcttcctagatacagcgctcctccctatgagcgtttgcgaagagggtgggaacaggtgggatggggcaaaatggtcccctgatcagcttgggatcagagtgatcgcgtctgatagtgggttgatctaggaatatctggggatttttaaaatgtatagaatatgaagaatggagggagaaaaagagttaaagccaggagagacttcttggcttggacagaacaggggatggaagtgttggttcctgagctggatgggcagtggggaggagcaggtctgagacgcgtgcaggaggagctgcagctctgtcttggatttgcagagtctgaaatgtctgttagacatcccggaaaagagctaacagggagccaaatatcggagtctggggctcagcacacagagatgaagacaagcattgaataggtaaaaaaaaaaaaaaaaaaagattaattcagctaaaaataataagcccatcacgtgtaaacatgtttttgtggtggggggaaccttaaccacctctgtcagtgtagtgagtagggaggcagtgtgtctccagatctctgatgtctggcgtaatgggattcagctgggtcccagcatctgttaccacgttcagtctgctgtcagtatcacacatgggaaaagtccgctgtgcactcctgagacagtgtgagtgaaaaggcaagtgatgtctttgcagcattctgaaaattggttgatctcatagcccctgctcctccacatctccgacccggacacaagggctgcagaacccccaggggtccaccaatcacactttgagaaccaccgtccagagatgtttatgctgtttagcgtgtggccagggctcctcatcactcctctcccagatagtgagttctataccccaagctgacatttcagtttggccctatctagggacttgctgaagccatttccatatatgtataaatttagctgtactctctgatcatcaaaagacacatgcatatgggtaccttcatatcacagaaatagcttcatatcctaaacagcagaacacattccaaggatacgaagaaaagttttcattatataaatgataactgagttacttggatagtgaaagagtcatcttttttaagcaatgcaattaaaataattatatttagaggaaatatttctaaaggacattttcaattgcttgcattgaagagaatataatgaacataatctcacttttctcagtacacaaggtcatcactgtgaaagtagcttcattttctgatgagataataaagtaatgttcccaggtgagcagagcagttgttttcatctgtggcagttgagacccctttaaaggtaaaagatattcactgcccctcagtgtcattgtaaattactctgctataaagatacttaaatactacaaccattagggataaatgtcttatgattctggatcttttttataactatatattaaatatacacattaaacgcagatgagactctaaaa

SEQ ID NO: 64098 - DNA, 694 bp, Bovine  19866881103743
  misc_feature (1)..(1): n is a, c, g, or t
ntctccccatcctcaatgagagcgagtctcattctgtccagtgcccccagataacctcgtcagaagccatcgggcctgtgtgaaggcaagactcggaacaccagggacgaccgggtgcagggcgtcagcagcgcggcccttaacgagtgactagctccagtctcgcccaggcctccggaaaggagagaacggtggggggcgctgagggggaaaagtgggggttttggcagaatttggcagcgttaacaatggttacaaccttgggtggacgatggccctttgtaaatttcatatgtccctaaaaatgttaaagacacagtaaaaaaaaatcccatctcaacgtgtttgttttcttatcaagacctatggtgaccggcaggtatgttcagggcaatgtggggccacagatgggcagccctcgcttcaatccgatgcagagggcgtcccgcctgggcttgcggcaaatgtgtttccatcatgaagcagaaagaaagagaaaggtgtgaagagagtgaaagagagacagggagagagaggagacttgattctcaagtgttgctattaagtgttgtcattaaggttcttaaaggcccgtgtcagttaagggtttgggtagggaaataaaaagcggcttgcatattgagaaaaggaacatcccaaatgtgtttactgcagagaagccgtctcctgtggg

SEQ ID NO: 64099 - DNA, 938 bp, Bovine  19866881116202
  misc_feature (1)..(1): n is a, c, g, or t
ngtcaaaagacaggaaggagtagggggccccccctgcctcatgagctgatggaatttgcgtggagactgtgaacacataagcatccctgtttaccgcaaaaaacattggccagacgccgctgctgctgcttagctgagcagcccagtgccagccctttccctgcctgctccccggtttcctcatctcttaaactgagcgagtccagctctgtttccctgctgtgctggaaggtgttggggacctgggatggtgctgctggccctggacttgaggaagcactgctagagcacgagataacatgttccaagctcaccgtggcgtgaagtgattgccttcttttttgggatgggccctacccttccttcaggacaggctcccgaagcgggccttggagggtgggctgcaatcagccggctctgacgagctcatggagggggcagcagatagagcacaggccaacgaaccatctcagtgaaagggtggaaggcaagaaaagcggttagacaggcattgagagtaggaaattgagtagaatttatgttggtcttgtgtttttgacgtgactttttctggtctggcttttgctgtaaccaaagttaattattcacaagtacttttagaaacccctatctaatgcggttatgttgcacgaatttaagttcatttaaatcattcttttcaactcaagtaagctctccttcactcggagccagagcaagctgatgggcccgtgagcatttctggctcttgtggccagtggctgacgtctcccgtgatcctgacaaggtgccgtgggctcagaagcacttctgaatgatcagggtggaagtacagcacttgctgagtagcctgggagtggaatgtgttctgcgctgcgtgctggtcctagcagccggctgtggggcctgtgcacagtagttccggcgggcagactttg

SEQ ID NO: 64100 - DNA, 795 bp, Bovine  19866881123952
  misc_feature (1)..(1): n is a, c, g, or t
ntgaggggctgatattacacaccctgcatgtcctttgcaaacacgactagtttcctgagcagcaggtaacactagcctgccccgtgggaccctcggatgccgccgagcatgtagccgtcctgagatggaagtgtagtttccatctgaggtttctgctgtactgtcatttctttggattttgtattttccataagggtatcacttaatgtgaagatcacttgggcgtcgtggccggccataatcacaggtattttcctttagctatttttcttagtcctgttaacaacctacagtcatagaatgtgacactttttattcagcacacccccccccctttttttaatgttgaaaatacttggccacaaatgcatccttttttatttcaaagtaggtccacctcaatcaagtctcaatatttctcatcatgtttttttccttgaagtggaagcacaaggggagaaagtcacatgtttctgtcctctggctcacctagtactgcccagaatgccttatggagtttgcatccaaggaggctttgtaaaggtggcattaactttgcagtaaagtaactgaccccagacctgtgtcacttcaggatcggtcaagtgctaaccgagcaacttaaaacttaaacagaggtgtgagcttgataaatcagtgtgtgttttggactaattggtgaccagcattctgaacattaactgcccttgcgtgccaggaggctgattgtgtgtaacctttgaatacctccctgagtttggacgagagctaaactcctatggtgcatttatttta

SEQ ID NO: 64101 - DNA, 1648 bp, Bovine  19866881208081
  misc_feature (1)..(1): n is a, c, g, or t
nctataacaggtcccagtcctttgaggcactacaggtagagctgggtaggcatcatgacaaggttatgaggaagcaggaaacataagtaagtaaaggaaactggcttgtgaagatcagaatggggcaacttacaggaagccaggctgcaccccatgaacgtcccctgcccccttctaataccccatcctgcaagcccttctctgtcttacaacagaaacccccttcttatcagacagcagagttggtacctgaacctacagcacactcccactactccacttttgctgtgtgtgctgtgctaagtcacttcagtcacgtccggctctttgtgaccccatggactgtcatccacaaggctccagtgtccacggggattctccaggcaagaatactggactgggttgctatttcctcctccaggggatctccctgacccggggatcgaacccaggtcttctgtggctccggcattgccggcagattctttaccactgagccactggggaacccagtgttctgctgtttatgtctctgctaaagtccagaagttggcatgacgggcccacgcttgagggtacaacagggtaggagtggcctgtgacatggagtatcaggggacaggagagcagaagggcctggtgaccaacacgtcagctgaggccacttcaaggcatcacaggtcacacgcttgtctggacgcctaatcactccattgaacacttttaagtgccgctcctgtttttacgacttgtatcagcatttggatttcaggaatctgaaatgcaaagtgtcctttttatatttttatacaaaagcaaaatacttattagctctgccttaaattggccgactctccacttatcaatccagcgttttcttcccttgagtgctaagtcttatagatgaatggcttgagggccaaagttaaagtaaatccccactaactttgattatctcaggagaatttcagcataaaataatgaaatgactaaagtgtcaatatgttgtaagaaaggcaattaaagaaccatcaaactaagggagaaactcaaactggcccattaacaagtgttcccccaaagaagtctagctgaaaagatctcattcattctacaacaagacacccacttgtttcaaaactggatgctttcctcacactaaagaggcacaaactactaacagacacaccgatgtggataactcacaaaggcatcatgaaaaagtgaaaacagtcagtctcacaaggttatacatggtaagaccccactgtgcaatattccaggaaagataaaactgcagtgatccagagcataccagtggtttccagaggttattggtgggggtgagggggtagaaaagactagaataagaaggagtttttgagaggggtaaactattctgtattttaagtatgcttgtggttataaaattcacagaactggaaagccaaaatagatgaatctaactgtcagtaatttctttaatgacagttcaagtcacacatataccaaaattaacgtgtttagaaacaatgtgtactcttaaataggtgaaacgagccccctgtgatccaatttatgcaataaatctgcacattttcttttccttacagaatgaaactataaactgcagcctcgctgaaactaa

SEQ ID NO: 64102 - DNA, 1411 bp, Bovine  19866881247819
  misc_feature (1)..(1): n is a, c, g, or t
naacacagtttacattcatctctaaatctgagattaagaaactagtagctggtttccaactggtttcaatactggtttgaagtctgaataattttactgtgtagacattaaatattttgtttaaatattaaacattaaatcttttcctgactatccagacagaaatagaaaaagcaggaactacaggcagaagaaacagtctagttaacagacttgtgacttctacaccatctgtaacaaggggagggacttcggcatgggtttcaaaattgcctgggagctgcctcctaaagtcacctctacttggcataaaccatttttttctacacaaggtatgtgattcctacaaaagaaaagaaacccagaaaacaaaacaaaaagaactggggtggtctcctgctgtctgattaaagggccagtattacactcatttaataagttatagtgggtattctgtagcactaaagggacggtcactttactttgtactactgagtccttgccacgcagaagagctgttcctgagaaaaaaaatacttcaatcctggttactctcaagaggacaccctgagcctgggtagtgtcctccggatgatgatttctggctggcaggaagctattctctagtaacttctaggcttactgcacaaagagttgaagcaccaggcaaactggctatttcagtaaatctcaatgtcacttgcatgtgctcagttaattattcaacctttcctaaattaacattaaaaaaacccaaaaaacaacttgcttctacaggcacatttctttaactactgaaataatatgctgggctgagctgatacggcacttcctcaggatgacttaaggaagcttctcccagagccagttcacacactggttacctcacaatcttctaaactatcactcaaagtcaattaggctgtaaacatcactgaagagctgggtttatggattagggaaaccgaggagcaacagtagcacacggcaaaacaagcctcggaggaaaaaccttttctttgtattttccattgcattgtcaagaggcaaggaggggagccacaacactactggctatttaatcaataaagctacactgaactgacaactaatatacaagtttcagagcctctgttaaattccccagcaataggcctaagctactgtcatcctcctcctccccagtaatatctagttaccattataaacagagctcatttatctgaagttgtggctcaactgtcagggcacacttgtagtagggagagcactctttttttttaatgcatctttttcagctcaagtgtctgaatattctccaagtatctgaatgacttagatgatgtgacagatgacttaaaagtcacatacagcttctacactcaactctgcagaatgtactctcacattc

SEQ ID NO: 64103 - DNA, 893 bp, Bovine  19866881309649
  misc_feature (1)..(1): n is a, c, g, or t
nttagttggctttggtgtttacattgagaggaccaagaaaatgctagaaaagctctgaatgctaggactggtggcgtggctgacggatcagcagtgggtgacgggcagtggctcggaagagtgtggcaggccccttaccagccctggaagctcaagctttggtatgaagattctgaatgactttggcattttccccggaagaatgctttaagacagacctttgcttttgtttttcgggtgaccagagccaacatgtgcttagagtgaattcttacatgcggggttggtttggggatttcaatttctttacggtctgcactgaattatcatttcaactgtgtgccttttttcatgaaagcattttacattgcattgaaaagattacattcttttggctttggaaaaatatttcctgttgggttcaaaccattaaagcctcttagccttttgcttctggaagcccctgcctgggtctgccttccctcagcagctgggcggccggccgggctgcctgagcgcgtgcggaaagcgctcagacttgtttactccctgtggcctcctgcccgctgggagcgccctgctcggggaggctgggcggggggcttccttcctccctgtgtgaggggggctcaccagcctgtgtttgcgtgtgcctgtgtgtatggttgtgcgtgcctatgtgtttgtgtgtgcctgtgtgagtgattgggtgtgcctgtgtgtgtgggtgtgcctgtgtgtgtgcttatgtgtgtctgtgtgtgtgtgcctgtgtttgttcctgtgtgtgggcctatgtgtgtgtgattgtctgtgtgtagctcctgggttggggaggccccctcccctctcctaccttaagcagtgccggtttttgctcccacccagttttc

SEQ ID NO: 64104 - DNA, 767 bp, Bovine  19866881698117
  misc_feature (1)..(1): n is a, c, g, or t
ngtggcatattatgataaacaagacgacaataaaacatttttccgctgtgataaacgtatttagatctatcgtagaggctgttggagctacaactgaaaaagatcaaaattacaagttgtttataacatagaatttgtgtctttaaagctttcattttttaggcagaagttgtctccctaggagatcatttccttacctttttttcaagcttgaactttttttttaagttatgactttttggaggctgtcaacacatccaaagtgatttaacaactggctaagggctgggcagcactgtttgcaaatgaacacaagcacttggctcagctcagaggccaagctggtgaagatgccgctccgagtggcctcctcagcctgcagagctattccgggatccacacccaccaggtggtcacaacactcgcatctcattacagcttgatattttgaacaaggagttcaattaacagctgtctcaatgtcccagagaccaagaagaaagagagtaagagaaatgagaaattatgtccagatgtctaaacatccatgccttcgtgccatttcttcgcctctgaaagcatttggtttctatatagaggcttcccttccatactcgacgcacacacacacacaccaaaaaactttaaacaataaaccttgccatccaactgtgactgatgaagatgtgcttgtgaaattggcttgtcagatgcacttacataaagaggatccccacttgatttgcagttcataacatcccttacat

SEQ ID NO: 64105 - DNA, 1530 bp, Bovine  19866880480803
  misc_feature (1)..(1): n is a, c, g, or t
nttcaaaaaaaataataaagcctgaaatctcattaaatagctagaaagagctagaagtacataaaatatgcagatactatcaactttgtgaaattactgatgtcattggtgttttattgcacagataacctttctacacaatttaactctcataacacaactcatgttttttaaagatgtaagaatctgaatctttcagttatgatttgtcaatctgcttctgaattaaaaggaacaaataaacaagaccacaaggtatgtcagttggcaaagaatctttcatggcacttagggagttggttcttgaccgaggtttgctttctgtaaaattcaaaaacaggacaaagcctcctccccaactccatgcccactgggtttttttcgggagaatccttggatttgtgatgccctttaaaacagtgaacttaagcctcattatcaagtccatggagatttgggaagagtcctgagcattctccagggattacttactactctgaaacaaagctggatttgagaagcaattctcccaggcaccagagggttgattaatctgccatttctccactgagataaatgagagaagaagcaacgccagcaaacactgtcctctcaaaggatcctcaaaaagcaagcaatctagaacacaatcgccaagatttacgagtcgcaggaagtatgctagggacttcaaaataaaataaattctactgcttattttggctgtgtatttatattcttttcagactccagacagatggttccccagtaagaaaaatttcctcctggattcatctctggacagtcactctagccggctcccctgggccacctggggctggaatgtactgagactatggaaactaatatctaaattaggtgcaaacaaatttaacctagagggaactcaactttatagtaatgatatttagcattttcagtattaagggtttttctggtgagtgagacagtgaagaatctgcctgcaatgcaggagacctgggttcaatatctgggttgggaagatcccctggaggaaggcatggcaacccactccagtattcctgcctggagaattccatggacagaggagcctggcaggctacagtacatggagtcacaaagagttggatatgactgagtgactaacgctttcacactttcattttccaagctccccaaaaataatgctcagagaatctacctctttttatcattaaataatgtaatcaattagggttagaactgcagatgatgattgcagccatgaaattaaaagatgcttactccttggaaggaaaattatgaccaacctagaaagcatattaaaaaggagagattactttgccaacacaggtccgtctagtcgaggctatggttttcccagtggtcatgtttggatgtgagagttggactgtgaagaaagctgagcgccgaagaattgatgcttttgaactgtggtgttgggagaagactcttgagagtcccttggacagcaaggagatccaatcagtccctcctaaagaagat

SEQ ID NO: 64106 - DNA, 1471 bp, Bovine  19866881136647
  misc_feature (1)..(1): n is a, c, g, or t
ntaaataatcatactcaataagatgtattttctatataatatccacatatgtcatcaatctgcactgaagcaaattaaaatatctcccttcaacaaacccatatcatctcttcagtcccttgtgcccagggcctggtaacgtatcagctaacaagtatttattcagtgattaggcttccctctgtgcttgcaatactgagaacagtgttctgtcctgggcacagtcagacaacacaggggttaagagcatgaccacctacatagtacctgtgtgtcctgggcttgttaacaagaaagcctggatataacacaattcttagctgatatttacagagcgctaggaaatatcttgaggttaggactagctatgagattgagatttctaaatctagctcactctgatattcaaagtaataacattatccttcaaaataacagtcatgttatcattagtcagtgtgtgctgagtacacacagtatacggacttttaccccctacgttccatccaaacaaaataccaactgttccaccacaatgaggatatgcattatgcataggcatagggaacttaatacatacacgtctagttgaagaacttaatgtctcatcaacttggaatatttgggccacctgaagttaactacatattagttcctatttaatggagtgatgtctcaatttaaatgtaaagcccattgctaagcaaacagcaagcgaagatttcctggcctttcttcagtatcttaggcttcaataaaatccttaacgttgtaaggaaagcatacaacattctgatttcttcaattattcataatcttctgatccccagtaaatctaaagtagcaaactcccaggacctattaccccacaccccaagcttctgtctccagaggagagacaggtgtgagtgatcaactgtcctgcaacgtttgctctcgtggaggccgagggaagcagaggacaaggcctgggttcctagatgccaagaactctagactctgaaaacaaatgcactcattcattcattctgtaaatattgatgaatggacggctagacaccaggcgctgtccccggtcctggaaacacagtcgcgaacaaaagagcaaaacctttgccatcttcaaggtggtgcataaggagggactccataactaactgcactaaaatgggctctggctcagcctctggggagacctgagtggacgggggacaaggagaatgtctgaggagccaatagagttgggaggatggagattcccagcccaaggagaggggcttcactgagaccaccctgagcctgaactatactgacatctgactcctgctgagaaatccaaggagaaagaagggagaagcaatctgcatactgacttactaaaagttcccatcctctgagccctgattgtgcatgcccacctgtgtgtgtgtgtgcaggagtgtgtgtgtgcgtgtgtgcatgtgtgtagaag

SEQ ID NO: 64107 - DNA, 1895 bp, Bovine  19866880480822
  misc_feature (1)..(1): n is a, c, g, or t
ntcagactagtaagcaacattttattttcgttaatctagtggaagatttgtttggctgttctgaattgggttttgaccttttgtcctactaacttggggacttctgaggttagtgtcttgcttaaatggaaactttgtttaatgccttactgtggagaggggcctgggtttggggcttcctaagatcttatttagctacatgtgcactgtgacattaggacttctttctaagaacaacttactttcttgtcctttcctctgaagtatgaacctgattaatcacagaagcttacatggtgttttattgaaaactcctttcaagatggatacaacttggaaagtttatcatgaaactggagaattatattcacaatctggagaatgtcaacccctctcagtaaaaaagtgaaagtcgctcagccctcctctgtccatgggattctctagacaagaatgtgggaggggatagccattcctccctccaggggatcttccagacccaggaatcaaacgtgggtctcctgcattgcaggcagaatcttaaccatctgaaccaccagcaaaagcctgccctaaaagctccccaggtctgactcaactcccaggaaggacagcacaaagaaaggaaatcaaacctcccgttgatgaacagggggtggaagggtggtcctccagtttcagtggccactgctatcaccctgctcagaggagagcactgcgcaatgggtacgtcttgtttataaatgataatcggtggcttagcagtgagtcccaggggtcagccactaaaaacaccaacttcaacgttgcattaatacaatcatcactgatctcttcacttaatgtttgtgtaacattggccgagcctttcgcccttgacaaagcataaatcttgacagtgtcattcgttatcctctctaaataaaggatggttttctaaatagaaatgcagcttcattttaacctaaaggccaatctcattgctgaggcagatttataaatgaggccatcttaaaagagaaaataatcaactattaattatttaaagtgcttaatgatgcatgaaatttgtcacatttccaagtgcatttccagctaaatatgcacagatgataaaagcactgggatgtaagtcagcaattaatttcaaataaaaatatgtttgaaatttagcatttacacttgcatttttcagaaacctaaagatttagaagagtctgtaacttgcctttaccattttatttatagctgagaatttgaacaaagagaacctgtttatattagaagggaaatagcatattcttgcaaagctttagaatctcaaaataaatctaagtcaatatcatttgaaagcagctgagttagatttggggaacattatgtttaactctcagtaacaagattagaataaatgctagtaaaacatgaaaaagaatgaggtcactgtgcttaaatattgtactctgtgagttagggaaaaagtagatatttgaaaacacaattaacctttgaaaatgaaaaaagccacattcacattagggaatgggcaaacttaactaatgaaaatttatagccctgtaatagtggcaaagaaaaaaaaaaatctctctcatttgaaatgtcagaagagtctcagatcttctgttaaacactttgttaagcttttgatggtaataaatattggactcaataattgaaaatatctcaggtattatgagactactgaaggacacttgcaaagtgtttttttttttaagtttcaaacatctgtttgttgattaaattatttattcatccttaatcactccttcagtaaatggagtgtctcctaggtgccaaggcattgaattagactccactgacactaaaaatagtgtccttaaggtcttcacagt

SEQ ID NO: 64108 - DNA, 2595 bp, Bovine  19866880666253
  misc_feature (1)..(1): n is a, c, g, or t
nctattgatacatattattagctaaagtccatcagacttcactctttgagttccattctctgttgaagtgtatttattcacttagtcatgtccaactctttgcaaccccattgactgtatcccaccaggctactctgttcatgggattcagacaagagtactgaaatgggttgccattcccttctccaggggatcttcccagcccatgaatttaacctgggtctgctgaattgcaggcagattctttaacatctgaaccaagtttggggaccgttctctgtgagttttgataaatgtataatgatctgtatctatcaacactgtatcagaatggttgtcttactctataccctctgcctttaatatcccctgatttcagccctttctcctttcccccatatcctgggaaaccactgatattttactgtctccttagctttttatttttctggaatgtcatatacttggaattatacaatagtttttcatattaacttctttttcttagcaagatgcttctttaagtttcatccatgttttcatggattgatagctcatttatttttattactgataatattcttttatatggatataccacaattttcattagtttgcctgctgattgatcacataaactttgattgtttgtttgcttttatctcaatctcttccacatagaacctccagcaattcatggatcacacttttggtgtttctacagttacccacagtcaatttctgatcatgagcttctgttcctgataatccttggttttctattcatctatgtctccaaagtttaggggcagctgtttgacctataacttcaattctctgatgactctaagagagttgatatttttcaacttgtctaagttttttttttttttccccctactgtgaggaataatgaccttcagttgattgctaatgctgaatttgactggtttatgtgatagaagcaagtaggagggagggtatgggcttcatgctttcctgcaagtctggctgcttcttgcacatctgtcccacatagggagatactctctggtccccagctcttccccttatctctcttgggaacatttagtggaggtccatgggaaagagacttcaagtattaatttccctgtgtcttaacttcccagagtcccttttcttccctgctagcaaacaatcattggaattttagctgatttactttcacccccacatatggcagctactccttacttctgtgctttggccaggttttccagtctgcacatcctatctctccatactggggcctgcctttcctcagaccttgggctccttagcttccctataacctcagctgtcaggtagcttcagaatatgttacaattttgtagtttatccagacttctttttttgctagcattgtaatgactcatttccagatttataggcagaagaatcagatactaaatttcagaatctaggttgaattaattgtggaagctcaatcctgatttaaaaaatgtgtcattaatctctctgagacttacttattccaacagtattgaaggtggtactgcattatattctttcatctgcatgccattcttttgaaaaggtatagaaatatctcaagtacattgagacctaaatattgagagaagtccgtggtaaaggataataagatggggaatatcataaggtcttaagtaactgctcagagaagcaaataaaatatgtcctcaagagaagaacaaaccattttctcaggaaaggaacacagaaatttgaagggaagttactcccttgagtcctcatacaagaggcaaattgtgatgttgtaaacaccccaaatagtgttcccaacataagcacacattttatgtggatgtatgattcttatgtgtttctctgtggaagttgagggcacaatgctaagcccatattcagtaaaaatactcaccaaaaaaaagaaaaaagaaaaaagaaaaaaaacaacccctccaaagagtatcatttttagatatttatgtgtcttgatgtttgaataagataaataatacagacaagaatgaaagtggaaaggactctacgctgctcaagcaattctctgaggcttagagtttcagacttaaatgttgattaatatcaagaaagagtatatattgcatacacacatatattgatataagcaaaaccataatgcagagtattccatcgtggaaattgaaaaaatatacagtatcatagactttgtgaaataaagcattctaaagagttgctcagtggtaatatgcctgacaatgcaggagacacaagggtctcggtttcagtccctgagttgggaagatcccctggattaggaaatagcaacacactccagtattcttgtctggtgaatccgatggacagagaatcttggtgggctactgtgggattgcaaggagtcagaatgagcaactgaacaacttctgaagactgaatatgtgatcatatcaaattttcaattatcacaataattcaagtctatggcctaactgctactgccaaagaagctgaagtgaatagttctatgaggacctataagtcttctagaacaaacacaaaaaaaag

SEQ ID NO: 64109 - DNA, 1576 bp, Bovine  19866881519780
  misc_feature (1)..(1): n is a, c, g, or t
naatggtcctcgaagatattctgataagtaatccacatattatacaatattgttcatataaaatgtgcaatacagggaactaatagagccataaagtagattattcaatatttattgttgggtgagggtagcaagacgggatgggagagcatttctttctgagaaatgataaaaatattctataattgagacgttggttgcacatacatgtgagtatactaaaatccattgtattatatactttaaatgaacaaattgtaatgtgtgtcaatcgtatctgaataaaactgtttaaaattttttcaaaaagaaatattctgcctcaacatgattgacaattagaatattattaagaatttcttatgaattgatattgatggatttgcagaaggcttcttgtatctgatatacttcctggtggctcagaggttaaagcgtctgcccgcaatgcgggagacctgggttcgatccctgggtcgggaagatcccctggagaaggaaatggcaacccactccagtattcttgcctggagaatcccatggacgaaggagcctggtgggcttcagtccacggggtcgcaaagagtcggacacgactgagcgacttcactttcttgtatctgaataatcccccaagcttactccagcttcaaaacggagaagaaataaattcatctgagcaactctgtctatggtaccatctctttgtaacctcttagctcacttctggattacttctgttacttttgtcatgaactagtatgtgtagaatctccttcagttgtaggatgtgtgtgttgctacacatcgacataggctgttttacattgttgacccctgattttaaaaaagcagaagattaaacatgttcatagtattattgtacttattattatttattgaggcatattgactttgttacatttgtaataaaatcactgcttttcatttttggtggtattgataactccacaagcaactgtgttatttgaaagaggcataaaatcaatcactgtgcaagctttaacctttattagtatgaccattagcagtaagtaaaataaatgtctcatcaattatttcactaactctttcattattcaatcaataaggtttgcagggcttttgcattttcaactctgtcaatattcaggttagtttacaacaggtacctgctttgccttaaacaggtataagttctgcatgtactttctgagtttccaaattcacttggaaatggtttgttttattccagaatttatatttccaaatattgacacataactattctattcctttccattgctgctgctgctgctaagtcgccttcagtcgtgtccgactctgtgcgaccccatagacagcagcccaccaggttccccagtccctggggattctccaggcaagacactgggagtggggtttccatttccttctcctttccactacttaccattaaatataaatttcaaataaatattaccagggtttttattggatttgtgctgtgactttttcagcaataacaggtatttagataatcattcatctgccttcatccatgtttatatgaaga

SEQ ID NO: 64110 - DNA, 1906 bp, Bovine  19866880472630
  misc_feature (1)..(1): n is a, c, g, or t
ngaatcttgaagagttgggcatgacttagctattgaacaacaacaattgttacccgagactccaaatggcaagtctcagcttctgaggctccccaaccaagcagggtaatactgcttactcctcttatactttctacctaccttatagcttcacaattaatccactttcattattcacttacagaaatacaaacttcaacaattaatagcaaagacaacacaggttttaacttgtggcttggaaaataaaaatggtgtagaggaggaggaggaggcttggaaaataaaaatggtgtatctatcttatccttcaagatatacctctttttgttgaggaggaggcttggaaatctatcttatccttcaagatatacctctttttgttgagaaaagctgtctgtaggtttcccaagagtcctgggacttccctggtgattcagtggctaagactccatgctcacaatgcaggggccctgggtttgatcccttgtcagggaactagagcccatgtgctgcaacaaagagtttgctggtcacaactaaagatcccatgtgctgcaactaagacttagtgcagccaaatagaaaaaaaatttcccaagaatcctgccaactgcttggttgtgtagattatatctccttaatttttcttacacccaatgctactgtcatggttcaagtctttgcatctctttcctggattattatcatcaacatattcttacctccagttttgactgaatcccacttaccaaccacagtgacctttctagaatttcaatctaactacattgtttccttgattaacctcaatgtccatctcctcttctactgagattttcaatgaatggtctattaaggagtacccagcagacctataacagactccacaaattataagccattgtttcatgacacaaagatacgtaagttcatagtcttttgttttgcatgtctgtttctcttattaggcttaagctccttaagggtatgatcatatctgattcataatcaaatggttgaatgaattgaaaaatgcaaccttccttaagcaaagcttccaaatagatgtttttctcatttttaagctacataaagctataggtagctctgtttcctttgcaaagtgctttcacataaaaacttctattgggcaaaaatgctcaataagaaatatgccaggcaccagtcttagctctttacatgcactaactcacttaatatcacaatagtcctataaggtaggtactatttctgttatccctgcattgacagatgagggcaactaaggaagagagagttacgtatgcatacattgactcattataatcattcaacaaacattttcagagtatttattgtgatattctcacaaccaaccacgagaaagacaggatataagcaatcatgactttgaaataagggccaaggagagaccatgtcttggttgtccttggagattcttggagtattcagaatagaatcacattcaatcaatatctgttaaatgggtgttgaattagtgcccttgaaatctggtggtgggattttctacatcaaccactttcccagactgatgcttaagagaaggaacccttctttctcttgatcaaactcagatacatttgagagtacaaggaggctttgttaataactatgcttagacaacaggcataaatcagcactgtccaaggcaaatcaggttacatggtcatattagctaaaaccagcttaatctgatacctacttatgatgttgacaaagtccctggtaaatataatcgttatggtcaaccttgctaagacacttagcacagcaatatgtgaggagcatgtggtcaaaaacaacaacaaaaaaagaaaggccattatcaagaaagcccactaatagtcacactttacaagaa

SEQ ID NO: 64111 - DNA, 4007 bp, Bovine  19866880485483
  misc_feature (1)..(1): n is a, c, g, or t
nttaatataaattgcttttgttatttagataaagtgccaataattaaaatccattgcttttattttctcaaatatgtttcttcctaacactcccaggaagtaatcaatgtagctcttttgtaaataggtacactacctggtatcaagttagctttaaagacaacttaaactctaaaatacagtgtaacaatgtatttttcatttctagaatcaaaggacaggatagaaagcctgtgaataaacccatgaagctacatatggtcaattaatctgtgacaagggaagcaagaatataaagtgaagaaaacatagtctcttcaataagtggtgctgtgaaaacgggacagctacatggaagaaaatgaaactgggacattctctcacactatacacaaaaaataaactcaaaataggttaaagacctgagtattataccagatactataaaactcctagaggaacttaggtgagacagtctttgacataaatcgcagcaatatccttttggactcatctcttaaagtaaaggggataaaaaatgaataaatagaacttaattaaacttaaaagcttttgtacagccaaaaccatcaccgaaatgacaggctacagaatgggtgaaaatatttgcaagctaagcaatggacagaggcttaatccccaaaataaacaaacagctcatacagctcaatataaaaaacaaacagagctcaataaaaaagggcagaaaatctaaaaagacatttctccagagaagacatcagttcagttcagttgctcagtcgtgtctgactctttgcaaccctgtggactgctgtaccgcaggtttccctgtccatttcaaactcatgtccatcaagtcagtgatgccatgcaaccaaaaggcacataagtggttgttaaaaggactaacaagtaataaaattgaaatttcatagaagtgaagtgattgctgtatctcaagatccaatctgtaattaaaattcaggtttttttccaaagaccagtatcttcaatgtcactgcataagacaccagctaagaccttaggtagaactggtcaaagttcagaacatgtgtggagaagagaggagtttatcttccttgaatatttacaaaagtcatttacgaagagctgctataaaggaataaaaaatttaaattagtaaaggaaaacatttcatagaaaaatcatttaatgttgaaagagaaaaaaatactatttgtttatcatcaacggtgtattgatttctaataacagctcatttgtttctgtgtgttagctttatcatcttattttataggagagacttggagaaatcaaagctaatatgctgataaatgttggacctgagatgaaaatgcagtttctgtgatcttgcctcagtgttatttaataagatgaccataggttgaaaatctggaagatggggcttacaaaaactcaggctgaatgtaatgtttttataaagtttgtttcaaattatttaatgatataatggctcacatagtaaagaatctgcctgcagtgtaggagacttgattgtgatccctgggtcaggaagatcccctagagaagggaatggctatcctttctagtattcctgcctggagaattccatggacagaagagcctggtgggctatagtccaaggggttgtgaagagtcagacatgactgagcagctaacacttccacttcttccatataatgatttatcacaggaatgttcaaatacaaaaccattgaaaactagaatttctgtcttcacaatatgccatttgatgaaaagatatttggagatttaatattttatttcagtatatgccacatgaccaattgctatacagtattcctgccaaagttaataatacttaagtattaaatggtgaacaagttgcagagggatgactaattataaataaggtatctaaggagttaaatttaacttctaggaaaaataaccaaataacccctaaccaaaagggcaaaccccaaatcttgatttaaaacaaagataatatagaaatcttcatcaatagattagctagaaaaatatggtgactttctgcttattaaagtttttgaaatgctgctgaaatcctttaatcacatggaatttaattaacttctcacttattgaaagaagcagtcacttcagtataggttgtgcctactatgacaaaaccatgagagaaaatatttcacatttttgtgaattattttaattcctatgctcaccattagggcattaaaatcactctaatgattcaataaatagaaggtaagattgcctttaaagaatgtgtgcacttgtacatttgcttggatggcacaaaactgatccaaatatatatatttgaattttatatatatatgacacagaagtattttagtcttttaattactctgttttggaagcattctctgtaatgtaaatgaaccaaattgactattaagttttaccagtctaatgtggtgtttggatatatccatggcagtattttgcagttctagttttgaatgttattcataggtttaatgacttgctgttcactcactaagtaatgtctcactctttgcaaccctatggactgcagcatgccaaggttccctgtccttcactatcttttggagcttgctcaaactcatgtccattgggtcactgatgacatccaatcatctcatcctctgttgtcccatttcctcccaccttcaggctttcccagcatcagggtcttttcaaatgagtcagttcttcacgtcaggtggccaaagtatcggagtttcagcttcaacatcagtccttccaaagaatattcaggactgatttcctttaggatgaactggttggatttccttgcagtccaagggactctcaagagtcttctccaacaccacagtttaaaagcatcaattcttcgactatcatagcaccctcaataaacctgaacttctaatgatgcaaatgaggcatacatgaccataacaggcatgccccaaagcagactgcagggtgttgcattttttcagtggtggcctgttcatgtggtaggaatctgaatcctactctcacagcactttcaccaaacactcagttctttgagggcagagggctatgtctcctttattataataaattctcagagaccaccaagtgcttagtaaatatttatcaagtggatctatttaatccttacaacactcagagggataaatattttacaaatttggaaactgaggttcagagaggtaatgtgacttgcttgaggttataaggttagtaagtggtatagtaaaaataacaacaataataattaatgctatttttaattctaaggaaccccaccctccatttatcattttccaaatgtctctgtcacagatttttatttcattctaaaatgggaaaggttctctctgcctgaatgaaacttgaagtttataattcgaattcttgaactttggtgggattttccatgctgccattccaggagtttcagtggctttaggagagatacacctgccacactgtatgtaaagacactctttagcacaaagtttctccagtactgtcccattctctccccagtcaccagggaagaattaatccaatttcaattcagtttagtgcatctttattgaatacctactatgtgccagggacttccttggtggctcagtggtaaaagaattcgcctgccaatgcaggacacatgagtttgatccctgggtcgagaagattccctggagaaggaaatggcaacccaccccagtattcttgcctgggaaatcccatggaccaaggagcctggggggctgcaatccatggggtcacaaaagactcagagatgacttggcaattgaacaacaatagcaaataacaactatgtgccaggcactttattgagtacttgtaaaaataaaatatttagtatgagagtctttatgtctgtcctcttagattaaaccacattttactactttcatgcacagaaaaatctcaag

SEQ ID NO: 64112 - DNA, 994 bp, Bovine  19866881384657
  misc_feature (1)..(1): n is a, c, g, or t
naaataatttttttgtctcttgacatttgtggataaaattagagtttctctaatgatttggcatggagttaaacaaaataaaagtattaaatatagttagcagtcatgctcatgtatacctatgtgttttatagatctgttttttttccccctagagtggttgtattgtacatagataatttcctttagcagcagggaagtggtttcttagaggaacaggtgactaatccatcagatgtctgtatttgggggagagatgatcttagatagtcactccagtatcatagaaacattttttttctaagagatatgagaagaggataaaaagcttataatttggaataatagataattggtagtataagatatgtttagatgactataggtgacactttgttgtttacttggtatcacataagtaagttaactccttaagtttagtagtaaacttacagactttgggattcaatatgaaagaatgtctagcaaaatatttaattttaaaagaacatgttagataaaaatgtatgacaaattgttacaaaatattttcaaaatgaatcttccacacaagaagtggagctatcaaaactctcatttacttctggcggcagtataaactggcataaccacttgaaaaagtttggtagcagctatttaaattgggcatatgcacaccttatgacccactagcaggggtgtacccttcccccgaatgtatatgtatgttcaccaaaggcaggtacaagaatgtcgacagcagtattgtttggaattgctgataagtggagcaacccaaatgtccatcagcagtggaatgtatgcttaaattgtatattatggaaagaaatctctgcagcaatgagaatgaacaaactataagcaacatagtgttgagtgaaagaaatgaattcaaaataatatatgtcttaggatttcattagtgtaaagtccaagaccagtaaaaactactctaaggtgttaaaagtcagga

SEQ ID NO: 64113 - DNA, 1224 bp, Bovine  19866881396762
  misc_feature (1)..(1): n is a, c, g, or t
naaaatggctgtctgaggaggccttacaaatagctgtgaaaagcaaaggagaaaaggaaagatatacccatctgaatgcagagttccaaagaatatcaaggagagataagaaagcctgcttcagagatcaatgcaaagaaatagaggaaaacaatagaatgggaaagactagagatctcttcaagaaaattagagataccaaggaaacatttcatgcaaagatgggctcaataaaactagttctaattctacagaaatcaaaggatcatagggatgaacaagagtattggaaggtaggcagaaggaacttggatggaataaactgttccaagattctaaattgatggaaagtagtttaaatgcccatgggagcttaaactcccagataggaagaggactctgaacaggctgggtgtgtgtgtgtgtgaccattggcccagatggataaggaaatagatgacatccaaaacttaaggatttaaatgagaagggcccagaacacattgtgagaatggggacatttcaaattgagcatctatagttcctgattactggatatgtttaaggaagagaagttgctttgttaatatttacgaatgctcactatttattaggcatcttatatacattatatttaaggcttaaaaatcctacaaggtaagggaaatgaatttctatttttatatacatggaacgttagtttagaaagggtgtaataaagaatttgcttaaactcacacagctagtaagaagtacaaacagaagtagaaacagatccagttgactccagggtcctttgctgttccttctgtatatcttccagagaggaaagagaaagaaataaaaaaaacactgagtctttaaacttggggattcattaacagaaatggaagaatcaaaggaggaaatggttttgttgtggaaaggatagattttattttggttgttgttgtttacttgctaagtcaagtctgactcttttgtgaccctatgtactgtagcccactaggctcctctgtccatcggatttcccaggcgagtatactagagggggttgccacttccttctccaggggatcttcctgatccagaggttaaacctgtgtctcctgccttggccgacggattctttaccgctgagccacttgggaagcccaggttttaggcccatgggaatttgaggtaataatgggatattgatatggatatgatgaagatgcattt

SEQ ID NO: 64114 - DNA, 1249 bp, Bovine  19866882081884
  misc_feature (1)..(1): n is a, c, g, or t
nttccgttctccgaggatcttccccaaccagggatcgaacccaggtctcctgccctacaggcagattctttatcgtgtgagccatcagggaagcccaactgaggttaaatgaagtcataaatgtagagtcctaattcagtaggaccagtggccttataagctgaggaagagagagatctttccctttctctgccatgtgagtccacagctaacatgaaagtgtttgcatctatgagccaggaaaatcactatcatcagaacccatgacactttgatctaaggtgttccaacttccagaactgtgagaaaataaattgctgttgtttaaatcacacggtctatgatgcttttgttatgatagtccaagctgactaatatacaagttttattgtcttactacattctggttcttagacccagcagacctgaaaattacaagctcattgagaatgatctgtgggtttttatttctctgtttttgtgttctgtttttggccatgccatgcggcatgcaggatcttaagtccccaactagggatagaatccacgccctctgcagtagaagcatggcatcttaaccactggacctccagggaagtgccatggtccatgttttagaaaaaattgttctgatggtttctttgatgccctgggttccttttgtggatttgagttgtgaatgcttcagagcacttgctttatttataagaaatagctttttttttttttttgactggtaagaaatagcactttttttaactggcaatgtcctggctcactggtgggtggcagctggcctgtcttccattaaaccaggagtaaaggatactttagcgtcatgatgtcactgcagccagagttctttgctatgctctggactcactgctgggcccctgaaatcacttaattaaagataaacacacatatacctgaacagcattaacacttgtgcttgttttgtcttccctgccatgctgagttattaattaacgtttgtataaaacatctgaatcatagaattcttttaggaggtcatcccttctctctgtagaccaactcttccacttgcatctataatgaaattctgagcttctcatcctccccaccacagatttggtatcctcacaccagtggatccagctgatgtcaaaattggaagcaaatatttaacattgcaacctcggacaaagtatgaggtctaaaaatgtgtgaccttgtgcctcataaagttctttttttaatgaatgta

SEQ ID NO: 64115 - DNA, 1742 bp, Bovine  19866880349914
  misc_feature (1)..(1): n is a, c, g, or t
ngttggaccagaagaagctccaaaacacttccccaagctaacttacaccaaaaaaagatcatgatcactgtttggtggcctgctgtccatctgatccactacagctttctgaatcccagagaagccattacatctgagaagtatgctcagcagatcgatgagatctgcaacgcttgcagccagcattgatcaacagaaagggcccagttcttctccaggacaccccctgaccacatgtcacacaaccagtgcttcaaaagttgaacaaattgggctatgcagttttgcctcatctgccatattcacctgacctgtcatcagtgaactacgacgttttcaagcatctcgacaactttttgcagggaaaatgcttcctcaatcagcaagaggcagaaaatgctttccaagggttcactagacaaatcaacttatttctcattggcaaaaatgggttgatagtaatggttcctattttgaataataaaagtgtgtttgagcctagttatgatgatttaaaattcacaatctgaaaccacaattactttttccccaacctaaatattatgccactttcacagagagatttaggggtgtcacccagtcaatgtttgaaccgattctattgatgctaagcccaatcttctatccactgaagtactctgcaggttttatatttggtctttggcagaaattatccaaattatccagttttaagtttgggtttactttttcctcccatatacactgtgccaaactcagagagatgcttgaaggtttatattgatgattccaaataactatttcatggaaacttgaaaatacctcacaaaaccctatttcctccctggcatgattttcttatttcattgaatccatatgataattgtaataacaacaaaccatgctttatatttccagtgctttgaattaagaattagtttgctaagtacaatttctgtgcattctcttttatacttgatgggacatgttttatgatcctcactgggattcggttttgatgaaggaagccaagtgttctaggaacagacgtgatagaagcttcagagagtcgctgcaacccaggccgaggtccagccccagaagaccactgctgctgctgctgctgagtcacttcagtcgtgtccgactctgtgtgaccccgtagacagcagcccaccaggccccgccatccctggggttctccaggcaagaacactgcagtgggttgccatttcctcctccaatgcataaaagtgaaaagtgaaagtgaagtcgctcagtcgtgtctgactctttgagaccccatggactgcagcccaccaggctcctccgtccatgggattttccaggcaagagtactggagtgggttgccattgccttttccacagaagaccactaatggaagcctgatcccccagctctgtaaaatgagttcagtctctattattgatgcagagcttgctttctcctttcaaaggtaaagtgcgttagtcgctcagtcatgtccgactctttgtgaccccatggtctgtccttgggattctctaggcaagaatactggagtggggttgccattcccttccccggggggatcttcccgacccagtgatcaatctcgggtctcctgccttggaggcaggttctttgttgtctgagctactaaaaggcaaatattttcgtggtgctgaagcccaagttgaaatgaaaattgtggatctgggggagagcctgaaaacaaaag

SEQ ID NO: 64116 - DNA, 1770 bp, Bovine  19866880359171
  misc_feature (1)..(1): n is a, c, g, or t
naagagtttgagcaggataggtgttagctcttcttctctaaatttttggtagaattcagctgtgaagccgtctggaccggggcttttgtttgctggaagatttttgattacagtttcaatttccgtgcttgtgatgggtctgttaagattttctatttcttcctggtccagttttggaaagttgtacttttctaagaatttgtccatttcttccacgttgtccattttattggcatataattgttgatagtagtctcttatgattctttgtatttctgtgttgtctgttgtgatctctccattttcgtttctaattttattgatttgatttttctccctttgtttcttgatgagtctggctaatggtttgtcaattttatttatcctttcaaagaaccagcttttggttttgttgatttttgctatggtctcttttgtttcttttgcatttatttctgctctaatttttaagatttctttccttctactaaccctggggttcttcatttcttccttttctagttgctttaggtgtagagttaggttatttatttgacttttttcttgtttcttgaggtgcagcactaactcttgctgtcttgcccttgggaagatctggcccctccccatgagttgagaagcccaataggggctttcttaaaaagcagagttcctttttagtcagttactctggccttgggaagggaaccagtatttaggaaaaggaagtggatgatgaagataataataaaagcaactgatgtcagttcagagttctagtcttctggatgttgtactgagatatatctcacatgtcactattataaacatttcctaatgggatgaatacttttatccctgctttatagatgaggaaatcagtgcatggaaaggataaattatatacatggtgtgggtcacacagctggaaggaggagctgatttgaaccaaggtctgtgactctaagactagccacactcttctgccatcctggggtgctcatgaaggggcagctgaagacccacaaatgtagaacatttcccaccaatgatctagaacctggtggtctaatatggtagtcactggtcatctatggctacttaaatttaaattaattaaaataaaaaatttagttctacagttgcactagtcacattttaagtgttcagtagccatagatggctagggtgtgccatgttggacaacttccatggcatttccattgttgcagaaagtgttaccgacagagtagatggtactcagatgttagaactggagttctgagtggttttggtcaattagggaaacattctgactgaaagcacgagggcttgccttttgggaagagaagtatgtggctattcaagtctacggtgaggaaggccagccagttcagctgcaaagaaagcatgagttgtaatgacagttctgcagatgagtcatcaacctggcagtgtgttgagggatggagcagaccgtgggtaagaagacactgttcgccctcaggcaggaagtgcaaggtgatccttggtctggcccagcaggattagagccttgctaatgtgccatggctggttttggccactactgcccagagagaggcacttaggatctgggaaggttaaaagaattaggcttgctcaactagtgttcttggtccaaattctgtctgtatctggatttgatccagtcacccgaaattgtgaccacatctcactggtttaaaatttgatactctctgcaaagcatccaatcatctcccaggattt

SEQ ID NO: 64117 - DNA, 1073 bp, Bovine  19866880360146
  misc_feature (1)..(1): n is a, c, g, or t
ncctggcatgctttggaaggagtagtagggaggtaccaggttaagcacagagagttgaagcgacttgcttcaagttagaagtaagaatgtggtagagtttagagtccaacccgggcagtctggctcctggagtcccagcgtcaccactcagccaggtctgggaaaatcaggtcctaggattagagtctactgggattgggacttgctgagtaaggatgtctggtgagcccaacagagaatggactcaaagaatggagggaaggcagtattcattgacacttaaaaatatttgtgtattcatgaaaatttttcttgcttggtttcttattatttctcatcctccaagagatggctatttaataggacttgatttccaactagagaagtctggaagtttttccttctggacccagatggcagagttctgagctggttctgagccgaatcaaaagatctgcagtggaatgtagctaatacagtaagacaggagtgttatgtatctttacactgtctgatacagtttttagagttgtatttttttctgaaaaacatttttgtttacattttgattttttggccatgctgttttactgaaatgccttgttttaaactggagtgggttgccatttccttcttcaagggatcgtctcaacccagggatcgaacctaggtctcccatattgcaggcagattctttaccgtcggagccacccagggctactgttttaatgcaagactgatccaaatatctgaatcaaatgcacatctacccggtggtgaggattccttcttaaaaaaaaaaaaaaaaaaaatacagtggctgatactgcaaactggatttaggatttctctccctctccttctctttttattttttcttttaaagtaatttttattggcattttccttctatttttaaaaactaaaatctgctgtttggcattttttcccccctgtttccttggcctgagttctgttttgtaactggatctgatttgccctctgcctgatttattttggcaatgcagttaaaatggtttcttttttccacagaaaatgtgtttttatttctt

SEQ ID NO: 64118 - DNA, 1758 bp, Bovine  19866880419665
  misc_feature (1)..(1): n is a, c, g, or t
natgactactggaaaaaccatagccttgactagatggacctttgttggcaaagtaatgtctctgcttttgaatatgctatctaggttggtcataactttccttccaaggagtaagcatcttttaaattcatggctgcagtcaacatctgcagtgattttggagcccaaaaaaataaagtctgacactgtttccactgtttccccatctatttcccatgaagtgatgggaccagatgccatgatcttcattttctgaatgttgagctttaagccaactttttcactttcactttcatcaagaggcttttgagttcctcttcactttctgccataagggtggtgtcatctgcatatctgagattattgatatttctcctggcaatcttgattcccgcttgtgcttcttccagtccagtgtttctcatgatgtactctgcatataagttaaataagcagggtgacaatatacagccttgatgttctccttttcctatttggaaccagtctgttgtatctagaaaaaagtgtcatctttttctgtaaagtttactgctttctatacaattctaataaaaatgatcattgcattactaaggttccacacaagccacagtagagctttgaatagaacacatatgtgccttactaaaagggattttccagaaaaaaggatctgacccctttaataatgagaaccatgttttaagaaattagaggcctaaaaacattcaccgacagtgaacaccaagacctccaaggacaggggattaaggaaggagcaccgtctgactaccaacagtggctgacatgtacacagtgctatgtaccaggcactgccatgctaagcactccagattcagtaactcactctccagtgactccatgagtcaaggccgattttcataagtgggcactgaggctagcaggttcaatagctcgcccaaggctacacaattaataataggaaagcagtggttccagcccaggaggtcacacctggaagcccatagtcactgccacagcaatcacacggagacactcatggcaccatggggtctttcaaagcctgcccttgtctgctctttcctgaacatcaccaatggggaagctgtccactccctgtagctttgaattttctcacattagatgtggatactatggagaagtctgagggttaatctgaattatagcttcacagaactttttaaagactttttgatgtggcccattttgaaagtctttattgaatttgttacaacattgcttctgttttctgttttggatttatggccacaaggtatgtgggatcttagctccctgaccacgaatcaaacccacaccccttgcactaaccggaaggtgacgtcttaaccactggaccaccaggtaagtcccagcttcacagcaatttaaagctgttcatatatttagcaacgttgggcttcccaagtgacaacaggtgagcttgtgatttaccaatccaatggatggtgaggaacagagcactttattccaagtaaaatggaaagttattctgtatctggaaaaacaagggttcacttgggaaggatttaaatgaaatacagcagttccctactagtctcagtacaactctgattcaaaatctacactaagctccaggcagatccacttatgactccgaacggtcccacctctttctaccaaggaaaacaaaacaagctaaacgctgcctctctgctgccttgcctttagtaggtctcccatggtcgtgctaag

SEQ ID NO: 64119 - DNA, 1042 bp, Bovine  19866880550081
  misc_feature (1)..(1): n is a, c, g, or t
ntttccagcccactcgcaggggtcttcgtgattcattagctcattcctcaagcatcacttttggatactgtgactccctttttacttcttaagaacattagggctttggactctgatgacatctcagaaatagatacttggcaagtcccttaggaatttgggctattttcttgtttgtgttaagaggggcttagaaataaccatgcctctcttactagaggtggaatcagaattagtaacaaggcaattgaaaagtgttgtagcttaaattttttttattagatcggaggaggggttatatgaagaggtagtgtggactgaattatctgcacttaactgtgctgctgcatggctggggctctgctcagggataaaagtctcctttttgccaagactatctgagggatgatgctcccttcctcttcaggaccacggccaggcacaaggtcagctctcctgaccttcagggctttcatttcctactttaacagtgagggaagcatgcttttctctgttttgcttttgaactcttatgacaggcagtgcagtgaaagtcgctgagtcatatccgactttttgcgaccccatggactatagcccaccaggctcctctgtccatgggattctccaggcaagaatactggagtgggttgccctgccccttccaggggatcttcctgacccagggattgaacccacatctcttatgtcttctgcactggcaggcggattctttaccacctgggagcctgagaaactataggtaccatgagttaatttttttctctatagcttatattttttttcagggcaaaatacatatgtttttttttaaagccaaaggatctcagatttgatggaaaccccttcagttggttccttgacatttatagacagaaactgcactccaatagccatggataggaccacctggctgatttagaaacggcggaatacatttctaaagagtaaaagcagtactttctttgatgcttgggttgccttatatgaaagaccaatcccactgagtccatcttaaata

SEQ ID NO: 64120 - DNA, 1742 bp, Bovine  19866880705591
  misc_feature (1)..(1): n is a, c, g, or t
ntaccatggcacttgaacttcctaaatagataatcctattatttatttatttatttttaactgaagctatttagaattgggtttatctcatttataactgaaaggaccatcttactaaaggttctattcctgaacgtaactggaaagtagtatgattgaatgtttgatatatagcagtaataatacttgtaataggtaatatttagtaagctctactacatgccagacactgttctaagtattttgcatatatcaactccttgaggcctaaggaggcatagttacttctgttttacagatggggaaaacagaggtatgaagatgtttcttggccagtgatttcagagtcaagaataaatttaaacattcaaggaagcactggattatccaaagaacttagcttgtaatgtttttcaagtgatgttaacattaccttaaacatttttgaactgcctttgaaaagaattattattagagccagtttatatcagaaaataaatatcacagtgtgtaataaacgcttcgtttggccataagggcatgcctgtgcttgctaaattactttgtttactacttgtgaccctcaatgctatttaactgttcacacaaatcaaattcacctcgaaagacacaggtatgtggccatttaagggaatgtaacgtggatcctgaaggtgatcctaaaaggaagacttccaaaccagtttgtgcaaggtatgcttttgaagaggacatctgagcacataaatcatagtgtgctgttttgaaaacagtcacatcacagtatgctaatgccttattattattcttttaagtatgtatccagtagaggcaaggcatggaggtgtttgcattagggactctgctgactctagttggtgtccggaaggtgagccaggtcctcagctgagcctgagaaagtctatttcattccagaaacagaaggtccaggttgagaaagtaaccatccattgatgtgggcggcacttgggtgaacacgtcaggagtctaacagaagagactgagaaaaagttataggaatgacgtcccacccctaacactcctagcaaccaaatctggatgaagcattttctggtatggagagattaggaaaagagatatttccccacatgttatgaaaatcatttaaaacattctaaaaagttgaaagaagagtacaacacctttattcaacaactgttaaccttttgtttgtatgggtgtgtgtttgtgtatgtgtgtgtgtgtatctagatttttgctgaagcttctgaaaataattttcagacattgagactctttgcccctagataactgaggtaagaattaggacattctccaacataacatcacacttgagataatatttcctaatttcatttttctcatccttactcaagtttctcccaaatgctcctatatcttttatgggtgttgttttcttccactcactccaaattaggatctaatcaatgcattgcattttgttgtttcatctctttattttcctttatgctaaaagtattgtgcactttaaaaacaaacgaacaagccaaaaaaaaaatattgtccctctgaagagaacaggcagtggtcctgtagaaggttccacagtctggattcatctgcttgctctctcctggtgccattcatctcgcctcttttccccatgtattttgtgtagctgaaaggtagatccagcggtttgacaagattcaggtcacacatctttggcataaata

SEQ ID NO: 64121 - DNA, 699 bp, Bovine  19866880775593
  misc_feature (1)..(1): n is a, c, g, or t
ntgcctaagggtgtaaactctagattctactccctgtttacatgaagccaaggaagccatgactgtgtcccttaaatcccacaagtagtgtctatttctaacatttattttcctggttaatatatcagtgacttcaccaatgaaaacccatttatgccattcaccaattcatatcataataaatggacagtggatttgcatttaatgacttattttatgtttggacttcctgattaagtactagttgatcaccctgaaatgtaaatttctcactaccccctaaagtttaataaacaaaacatttgtatcatactgtgtatggtgaagtaaattaagttgtagagccaagaggatgtgtaaagaggatgtgtaaattcttagaccagagagtggatgcaggcggagctaagttgagaactggcatcaaccttcacactggactccatgttttcttatgtttagttaccatcagattgcttcatgtattggatttggcttcttaatcagattataaaattcttggaaagagtgatcatttttccacaatggccagcacagttgtagatatatatacttacgtatgtataatatcttttaattgtttaaatttatggcaatatttggcttccccagtgactcaacagtaaagaatccacctgcagtgcaggagatgcaagaaacatgggttcgatccctggg

SEQ ID NO: 64122 - DNA, 1178 bp, Bovine  19866881126625
  misc_feature (1)..(1): n is a, c, g, or t
ntccctcagtggaatattatgtagtcattaacatttctgcggtgatttattttcagtgataccatttcaggcataacaattgtgacgtctggactagcatcaaagttattcacaataaatacttttgaatggcacctaacattaaattataactatagtggaaaaaatgatatatgtatgtaggtatgtatatgtatatatttatacctatttatgtatacacacatagatacagatatgggatagaactaacataataaagatagttttgttatagaagcaaaatgatcagctaattttccccctttattttatatagaattatattcatgttgcccaaatttttatgacatagaatctggacaaaattaaaagcacatacatgactggggtgatttattttcagtgataccatttcaggcatcttctaaaattcaagcttttctttgcactgaaactctctggagaaatgtaaattcaacccaaaccaaagtcagcctcagagaatgacagtgttcccaacatgctcggagaactgcaccaaaaaattttttaaaatccaggcccctgtgttcttttaaataatattaatgtggttccaaactcttaacttcctggcaatgctagtcatgccccaagttggaaaatggcattgaatccatgcaggatgtttaaaagtgccttcgtgataatcacaatttcccatattttcaactttacctttgtatcattttacagcacctgcaccccatctggattactttttgttatcatctggggaaaaaagagagaagtgtgaatgacattttacttttttttaaataaaaattgttggttttattgtgggaagacattggtttctttgcagtcagaatgaaggagcggcacaatttaattctatataaatgagtgaatatataaagtatcaaatataaacagtagtgtaacaagaaaataaattgacagaaataatcattcaactactggcaataattaagactaccgtttgaaagatcttctataaataaagaatgaaaaaatactgtcataagattttatagcacacaattgtattccatcctaatttattactattatagttccttcttcggtattagtgaacacatatcatagcctgttaattcactgtgtttattatgtaaccctcacaggcaaaa

SEQ ID NO: 64123 - DNA, 1711 bp, Bovine  19866881203016
  misc_feature (1)..(1): n is a, c, g, or t
ncatgtaacctacccacagactggcttttactcgcatttatgccatacagcccatctcagtgtacttctctaacttccatgagaagaaaacccaactttcttcccaagtggagttaaattctaaatatgataagcctcagttggcaccaacactgtttgccagaattaacttttccttgtaatttgtaaatgcattcaggcttgttttggggttttcttttatgggtttgcccccacccccacctctaagcagggccaatatctaaatagaaagaaaagacctccagctgggctcctttctcccaacaagctttgcaagctttgcggcatcttccttggatacggttcagctgggggccttccctgtattccaggaggaatttctgcgtcctcacagaggggccctttgttgtctgaggttgtgagaagttaaccactactttgcacaaggaaatatcttttccctctgtgaagcaatgatcaaagaagaatgccatttaaaccaaggaaaaacaaaactgtgatttatctctagaatctctatgggaaaaaagaaaggccctaattacttcagtaacacatcagctgcagtagaaagtgtaaaattcactcatctattgatggatttaagtttagtccttgatgcaaagtctaagtgcttttttaaaaagcatacaaacatttttcttttttccccttttgcagctgctctgctcacaaatacctccaatctttttcaaatgctttaagaattttttcactaaaaatatatttgtatgtgtacatatttatatataaaatagataaaattacacagacatatgcacaaatacatataagcacacaaagtttaggaaaagtgtgggaagaagccttagtcaaggaatctaacctgggttaggtgctcagttttttctcaggatttattttagtctatgtccatttgcatatccattttacacaatatataacaacttcatgtattgcttttttcccctttaacattatattttgagccttttccatgacaatccataatgtccataatgatttttttaaatggctgcaaattattccaattaattatgccagttaaccatttctctctattgcttaatatttctggaactttccatttttgttaaagtcaccctccttgcagtttccaagttccaagtctgtggtgccaaccataagctttatataattgtaacaagtgacctgatttcgattttctttgcctctcaatttcttaattttcttctgacacaaagtaaagatctataggaccaagctgttaagagacagcaggaggctgtttctccatcacaaaccaggcaatgctgcatccataaggcatcaccgctcttcagagctttatccaggtgaaagcaaagggaacctgcctagccatcacctatccaggcagaaatcctcttttaccaaacagttaaaaaccccgcacagtagatgccagggaatcagacctgaatccttattgtttagtcgctaagtcgtatctgactcgttgtgaccccatggactgtagcctgacaggcacttctgtccatgggatttcccaggcaagaatatgagcgtgggttgccatttccttctccaggggatcctcctgacacaaggaccctcatctcttggttggcaggcagtggattctttgccaccaagccaccgggaagccgacctgtattct

SEQ ID NO: 64124 - DNA, 1565 bp, Bovine  19866881210152
  misc_feature (1)..(1): n is a, c, g, or t
nctggacacaattgagcgacttcactttcacttttcactttcatgcattggagaaggaaatggcaacccactccagtgttcttgcctggagaatcccagggacgggggagcctggtgggattctgtctatggggtcgcacagagttggacacgactgaagcgacttggcagcagcagctttcctttatacagttagtctgaaagttgaatgacaaaatgtgaattgaaattgtagccagttttataacttctacagactcagaccaaactattccattagttttatattttacaattgtaaatctgtaaaaacaaatgctggttccctcagtagctttaaagcaacaaataagttcttgtgaatttcagcacaatgcccaattctttaaacttctcccatttttaaagaaatcagttgctgagcccagaattacaggaaaaaaatgatttataaaattctacttaggacacatggagggcatattgaaagaaacacttttataacagtcaccaaattataagtccctgtgacttaaaggtcactaaaaaaaaaaaatgcttagggaaataaggcaaaacacaagagccagcagaaaggcaattacataacaggtcaaggaactgtcctaagatccatgcaaaatccggttagaatctggctggcatcagctatagctacaaaggggaaattggagttccctcccacctctcttgaaattatggacccaacatgaaagacaactaaatgaacgaaatgacactctgatacgctattacactgctcaccttcttaatcaagagccttatcactataattaggcttagggttattatttgacctgggtttcacttttctctttgagaaagcttagataataaaacggaacctaaacctgtctataaagatgactattatatatgccttttatttcaattcaggcctcagtaatagaagaagataataacagaacatttaaaattctccaaatcagtcactgcaattggcattttatgaagtgattctgaatagggctgtggagcagactccggctcagaagttgggaagggagggctgaggtcggataaagggcatagagagccatacaaaatttactttcctaattatcatagacaaaagcaggcttacaactttatattttgggggtataaaatgttccaacctaaaatatctaaaaatcttttttgccttgagcttttgtaacaactttggtctgatagttaaaatagtttaaaaaaccctgctgatttttataaaattttgtaggtttttataaatcatatcagtgagtttcatttatctgtgtttcacttcaccaaacattaggaaatacttttggaaacatttattttccaatgaaagagaaggtggggtgagcactcctccatttgccaaggtccacactagctgctctgcctctggtcaccaaatccattgtcattgggttggtcaccactcttgcattttccttgaatttggttctcttattgcactggcttatgagtctgtcctagatgaagtggttagtaaatatttaaagctctaa

SEQ ID NO: 64125 - DNA, 1094 bp, Bovine  19866881313027
  misc_feature (1)..(1): n is a, c, g, or t
nctgctgttactgtccctgtggctggaacctagtgacttggctgctttgctttactctgggttttcgtctctttaacctcacaccttcccttcctttctgcctcaggtggtgaggggggcttccttagttgtttgtatgaatgttcccagtgttactgggtgaaccgaggagttggaggcaaatgtcatcttatttcttggggatatgttatttcttcattctgggctaccattcttcaagattaatgatgtttggtactttgggtattggaaataatatagaatcgctttgtaacactggtttcggggagtaatgacgaaagcttcctttagggtcagccagattgctgtgattaattcaacaaacatgaactgaatgctgtgtctctggcagctaggaattttgctgcatgattgctgggcaataatatatcataaaacagggtcagtgctgctggaccttagaaaccaggagacctcacagtgtaccagggagtgacttagaggtgcctaagtataacgaggttggatgtgtctccttcaagttgtggtacacagtcaattctttttatttgtggattctgcatttgtgaattcacctactcactaacatttaatttgtaacccccaaatcaatactcatggcactttttatggttatttagggtaccagcagagtggcggaaaatttgagtggcttgactcacatattcctggctgaaatcaaacataatgatgatctgctctctagtttcacttctcatgctgtaaacaagtctgtttaggaccatgtttttcacatcttggtgcttttttgtggtgatttcacttttcagagtgctcttcgagattcctgctgagtgcagtctagtgtcctaagcaggaagtctaatgacgtgcctcacggagatgtgccttccgtgtgtcagaaaagtttcgttcagggattgattacatatggtgctgctggctgtaggttcagggttaatgaatatatagtgtatatcaaataaggagtcctggtggctcagatggtaaagaatacgattgcagtgcaggagacctgggttcagtccctggttttggaagattcc

SEQ ID NO: 64126 - DNA, 1936 bp, Bovine  19866881406213
  misc_feature (1)..(1): n is a, c, g, or t
natgtccattctctaccccccaaccatgtatgttcttgttttgcatatcacgttagttttcatgctttgccctctgtcctacccccggcagccacagtaggctttagcatgagtcggatctcagtcctctgctccacgtactctggcttctcatgaccgagtacagtaaagtctttctggtcagtttcaaggtgacaagaccccactcccacactcttgtgcttatgctgctttaggcacccacctgcttcctctctcctgagcatgccacgcacgctccccaattcctctcctggaaagctgtgcgtgcaccgtccacttggttcttccctgtccctcgtcctgccaccgcctccacagtcaccttactggtgaggctttctccacctttctactcaaaataacaagtctctcccctcacttctcttccctctcttccttcctttttgtatttttctccatagctcttgttaccatctgacttgttgtttacttgttgctttgatatttatctgccctctcttgttagtcccacataaaaatgatgcaagtcccacataagaataatcctccatgaggaaacaaagtcttaccttttcagtacaactctaacattagtcataagaaactgacctacaaaatgatcatttcatataaaatctacttgccccaaaactaagagcattcactaggaacagcattcactaagtagctggtgaataaatgaataatttatccacatactaaaaatattatagaacatcctttatgtactttaccccttatgtggagtttgaatataaatggacatgcaaatacatattaaaagcttttactgatacactgaatctagcttttaattgtatactatgacattttctccactagtaattcacaagcatccatcaacctcagaacatctgtgtggaaagggccaacttccctatcggctggtagtgtttgggttcaagataaggtctttcttcagctaaattaaggccatgatttagtgcatcatctgtcacagagtgatctgcttctcttaccaccactgtgtttacacagaggactggatttggatttggatatccctttagaaaataatgacaaattaatgataatgttccacttgagcatctctggctgaaaatcaccataaaaacaatttttttccacatgatatcaattcctattggtggatctgacacagtgtatttagttgaacaatgtttcagccacagtgtttaaagaaatatgccagaaattctaatgctgagaaacagatactaggatggaataccacatgataaaatgtaaggaaaatgaggatacttattggaggactgagtaatcctcactggtgatcacaaggtgcttggaaattgttgtcaaccccaagccctccctttgattaccacttcaaattattaaccattaatttgcagtgctgttcatggcaagtggaggattttgtcctcacacacaggacaaggagacagtttaagaattttaaatagatatagaagagcaagtatttccctcccccgattctaaaagccttttaagaatcacaaatcaagaattctcacattcatctacaatttaatataaagcattagtgtttctatacccacaacaaaacatggacctgcagaagttttcaaacaatcttccagcagcttcatgcgggtcttctggagctcagggctgtcccattcatcttcatgaactccccagtacagatctatgacctggggacccagagaggaggcagtgttaattcacctgcaggaaaactcaactgacatgtaggctttattcttattcacaatattaagctaatatgacttctaacttttctcttggcagcatgttttgcctttgatagggaaaatgatttttaagattaatctaaaggggtattttttttttttta

SEQ ID NO: 64127 - DNA, 1337 bp, Bovine  19866881557344
  misc_feature (1)..(1): n is a, c, g, or t
nggggggatcaagtatccagggctagactatcttcaaggagccttcaccagcaaagatgcatcttttattttctattacagttaaactgtaagaagaccatcttacaaccagtaacaaaatgagatccaagggttgggggaacagaagcacaggtacacagacatgtgtacacacacacacgcgcatacacacacactctgatagctcagaccgtacacagacagttccactgtacatagtgaccgtcctggagaaactgcagtgtgtacaccaaggccacggatggggaattgggagggatagtggttgggaagattaaaaaaatgagctcttttcctccttggataaggaataaaatttctcaccagacattttttaaaccaaaatttgtttcaaagcaaactgaattctgtatccagcatagcaacagtattcccttttagctttcatccacttgcctgtagactctaccatagaaactgtataaaagataaaaaataattccctaggcaacttcacacgttttaagttctcagtcttttagaactcttcacatatagtcatacctgcaagagaaaacaaaaaggtaaagcattataaaaggcaagcatcatatcccatattaatctgcctgaatattgaagaacatgggggaattgcaatcttccatcctcacctcatcccaccccatcccactccgtcctattgcattccttccctcgttacaggttcttctagaattcggtctagggaaatttaagtaccacaatttccaaaggacctctttattttacaaaccaagaaagaacagaacttgagaaccaccgtggtctgagggcttcggtctgttggacacaaggttctggggtaactggtgggtgtcctccctgcagagcctgtattacttattcaggaacctgtgctttaacttttcatttccattctatgagtaacaagctacagggtgagcgtggtcatcacgagtatcctcacgtgtgtcaggcacagtgtctttcccaagccccccgaaactgacttcactccacatctccactgagcccccggggcagcctgaccgggactttgctgggcgagtaagaacacggtgacaaaatgctcggtcctaggtcttccttctccttcagaaagctatatacgatatttttaggttcttccaacaactggcccacgtcagtgtctatgtttaaattacaaatgacaccccttgtaaacctgaaaaataattttctactttttttctcaaagggtgttttgtttggttggtttacagtggtctcacctaagtgacagttatgtacccttttacttttcccgt

SEQ ID NO: 64128 - DNA, 884 bp, Bovine  19866882022275
  misc_feature (1)..(1): n is a, c, g, or t
ncatgaagtggattcccagtcctgtgatctgtcattggattacgtggtttctggtgcctgatgctgactatcagagtaacagaatcctgtgtatggaatattgcctggcccgactctatcttttctgcagggtggcggcagaacttagaaggacagaggattggggtttcaagtttacaaaacagattgctactctgctttgtgtctgcttgcaaataaaaatgtgtgtgtggagaacttggtctgagacttgctttcattacatcctaacaggggtgatgctggagactggctaattctcacccacctcaaactttcctctggctgctattctctaagctggatcccacttagtttggttttcagatgcttgaaagagctacttcaaggtcaaatgcaactttggcctttccaggttatatggctgattatactggtttgggcttcccaggtggcacttgtggtaaagaacccgcctaccaatgcaggagacataagagactcaggctcaatccctcggtcgggaaggtcccctggaggagggaaaccactccagtattcttgcctggagaaacccacggacagaggagcctgggcggggtacagtccgtagggtcacaaagagtcagacacgactgaagcgacttagcatacgttcacgtatactggtttactcccattgaatgaggatgagcacccacctcccaggtgatgcaaaatttaaaacaattctgtacggagccctgtggggctcattcattgctagttttcctcctctgcactaatgtccccttgttattcttttcctatcccagaggaaacacatgcatgtttgtagaactgaaatgagtaatctctttatctctattctcctgtttcagttt

SEQ ID NO: 64129 - DNA, 1539 bp, Bovine  19866880237435
  misc_feature (1)..(1): n is a, c, g, or t
ncagttcagtctctcagtcctgtccaactctttgcgaccccatgaattgcagcacgccaggcctccctgtccatcaccaactcccggagttcactcagactcacgtccatcgagtcggtgatgccatccagccatctcatcctctgtcgtccccttctcctcctgcccccaatccctcccagcatcagagtcttttcccaataagtcaactcttcgcatgaggtggccaaagtgctagacctatataaaatatatactcatacacatatacatagtaatacacaagtacaaaatacatattctggactggaatttatcagtattatgtgaggaattgttaatagggaagatgggatccagaataaattactaatgaacatatataatataaaaaagaatacgaaacaatccctaggaataacttggaatacaaaggttttgaactatctcaataaaactggaggctttggaggcttgtggtggtagtggtggggaaagaaagaagcaagtatgtttggagattgtgggaatggaatgcggggagtagaaaaatgattaatcctttggtggaggctatatatcactttatggaataaaagaaaaacattggtttaattatgtgcattaaccagagaagggtaagtaccagcagaatttaaaagtttagtagaacttccaaaatgaccaaaaaaagtaagaagaaatgtgacaaagaaaagtaaagaaacaagaaactagcaacaaagttaaatgagtgaaatatattaaagagggaaggagcatgattaaatatttcaggaaagatactaaatagaagttggctgaatttctccagcaaagaccctagactgtcagattatgttaaaaaaaaaaagcaaaattctgttacatgtgttttataagaaaagcatttaaaataataagacaaaagttaaaatagcaagaacacaaccacaaacacagccaaatgcttgcaaaaaaggcattattatctctataacttttgaagtgggctataacaacaaaaaagtaagtctacttaaatctatgttagaaatcctactatttgatattaaaatgatctccttctccttgcacaattgctggaattggtgttatttttcaggagaaattaagaagatcaagaaccacttttattacctttttttgggaggcttgaatggcttgtttgaaggcagaagaatgggagctgctttgacttctctttgaggaatagaaaatgggtacacgaaaagagctcgttgctaggccagaacctaaggcttcttgatctttattatcttcaagaggaattaaatcgtcgtagaaatctgcttccaaatcatcttctttagtttgcacctggaggaaaatccacaagaaataaaacataattcaggaaattagagctatttgtgaacacctaatgcaatgatcattcattcattcatgcattgagtaaacagttattgtggacccgttttcctagagaacaaggaatagtattagtctgtgtcttcaggaagttaatagtttagt

SEQ ID NO: 64130 - DNA, 1817 bp, Bovine  19866880391905
  misc_feature (1)..(1): n is a, c, g, or t
ntgttgatagtggacttagagttaggagaactctattacaaccaagctatatgtcccaaataatgtttctttttccctccagatctctccaccatccttcaccttgccctttgcttcagaaggctcactagtatggaattcattaatgggtttctatgttctcaagcttacagttgggcctaaccagtgaaagtacttcaagtggctataggaaagtgatgttggggcatttattcctctgcatccctctctgagcttgctttgggacaaataagtcccttcactgaaggtccttattcctctcaaggcagccttcattatagccctcttctaccagtttctggtaaaactcctgtccttattctttgcagcccagaaatggtaatggtttttcatatattactggccttgagaccggagaaggcaatggcaccccactccagtactcttgcctggaaaatcccatggatggaggagcctggtgggctgcagccattgggggttgccaagagtcggacacgactgagcgacttcactttcacttttcactttcatgcattggagaaggaaatggcaacccactccagtgttcttacctggagaatcccagggacgggggagcctggtgggctgccgtctatggggtcgcacagagtcagacacgactgaagtgacttaatagcagcagcagcaggcttaattttatcttagtaaaggtgaggttttaattagctatctaccaataataaaatacaactaaaataatacaaactttagaagtcctacagtgccttgtggattttctcaacaagtatcagcgtaagaaggtagcatagaaaatgactatgatttcttgcctaagagactggggacagtgttataactgaggatgacagatggggaagtgctgccttggcagtgaaactaagttaacatttattgactcctcctgaagagtctcttctgggatctaccaaggaatgtaaggggctgtgccatgtgtcacggaagcccagacacaacaggagaacttgggagtatgcagtggtgtagggagccccccgccaatctaccctcacccctaccccagaaaaagaggagaattcaagaataaaaggcattgaggtatgaaggataaagaaaatggtcacaagttgtagtacttgtgctgaagaaaggtcaagtggaatgagtttggagaattttaggaggtcagattgggagggtattggacatactggtaagagattggggaagaaaaggggaagaaattgacgaagcaaaaatggatttctctaccaagatttcacctaagggaagacagaatgaatgataacgagaaatgcaggctcaaaggaagttttcttagcatgggcagtaagcagctttgagaataaaactttaactttctagagtctttaataaatcaagtctctaataaaactttaattttctagaaccctttacccagggttcatgggtaaccatcttttctaggtgacccaatgctgctttttaaaataccaaaaactaattttgacccttttttcaatacccaaaatctccagcaatagcaatatcaggatagtctcttgcctttaactatggatggtactcttctgtgtacttaaatgaaacaaaggtaggcacttttttgattttagctttttattgaagtttagatgatttacaatattgcatgagttttagttttaagtgtacagcaaagtgattcagttatacatatatccactttcttagattcttttatatatacatatgtaagttttaaatacatatatattttttcagactct

SEQ ID NO: 64131 - DNA, 2356 bp, Bovine  19866880425159
  misc_feature (1)..(1): n is a, c, g, or t
naacgctgttagaagatgtttgctataaccttgttggagtctcttaaggactccagaataagtacctggtcttggattttatgtttgaaaactgcggtggtatgggggaaatctcatttaagcgatccccctggcttctttctctggaagcgtgtctcctccttcccatttgcggttttttgttttcctgttttctggtaaaactgccttcttagcaaagtcagccaagctaaacgtctctgatttaccagcagaacactggctttcactgttgggttaaagggcagagtgctaaattgcaaaataatgtcattcagagggcttcagagtagtgctggcccattaagcagtctgtgaagatcaccgaatctctatcctaaagtaaacacaagttgaaaaatgattacatgtgcaaataatggtgaggcaaacagcaggagtaaaactggaaaacaaatctgtaatttcttcaagagtacttgaatatatgttttctctataactttatttccctgagatcttcaagaggtctctccccgctgagtaacatgcctgtgtctcaaccatagaggtgaaccacggaggccagtggaggattaaccaaaagagaggcatccaggggtgtgggggtgggcaactctgagcggatggtagtgtttgggagggattcatggaaatacttgttgaggtgagaaaatagatctaaatttctcctgtcacacaacctgactgtgacttattctgtacgttatgagagcaagcaagaagccttcagtgggaaattacagtctgtaagaggctgccagaacagctgaactggatcctctgactagaggggccatgctgtctccagcctcccaagaagagcagcaacattcactgagctaggaatgtgccacttggggtgggataatcagttggctttatattgtcaatcacggaatttatgttaagatttgtgattataataataaatttgttactcattaatatttatattgtatagttgacatttagttaataatgattctgtgccagatttctacattctttacatgtacacgaatacatctaatcttcacaatagcaccttgaggtagataaatatgatcccagtttcagttcagtcactcagtcatgtacaatttttgtgaccccatggactgcagtacacctggcctccctgtccatcaacagctcctggagtttaactcacatccattgagttggtgataccatgcaaccgtctcatcctctgtcctctccttctcttcccaccttcaatctttcccagcatcagggtcctttcaaaggagtcacttcttcacatcagatggccaaagtattggagtttcagcctcaacatcagtccttccaatgaatattcaggactgatttcctttaggatggactggttggatttctttacagtccaagggactctcaagagtcttctccaacaccacagttcaaaagcatcaattcttcgacactcagctttctttatagtctaattctcacatccatacatgaccacctggaaaaaccatagctttgactagatggacctttgttggcaaagtaatgtcactgcttttcaatatgctgtctaggctgatcataccttttcttccaaggagcaagagtcttttaatttcatggctgcggtcaccccctgcagtcattttggagcccccagaataaaatctgtcgctgtttctgttgttggtccatctatttgccatgaagtgatggcactagatgccatgatgttagttttctgaatgttgagttttaagttaactttttcactctcctctttcattttcattaagaggctctttagttcttctttgctttctgccataagggtggtgtcatctgcatatctggggttactgatatttctcccagcaatcttgaatccagcttgtgcttcattcagcccagcatttctcatgatgtactctacaaataagttaaataagcagggtgacagtatacagccttgacgtactccttttcctatttggaaccagtctgttgttccatgtccagttctaactgttgcttcctgacctgcacacagatttctcaaaaggcaggtcagaggctggtctggtattcccatctctttgagaattttccacagtttgtcgtgatccacacagtcaaaagctttggcatagtcaataaagcagaaatagatgcttttctgggactctcttgctttttctatgatccaaaaaatgtcagcaattttatctctggttcctctgccttttctaaatccagcttggatttagaaaatttcaacagtatgtgaagttcatggttcacatactgggaagcctag

SEQ ID NO: 64132 - DNA, 1353 bp, Bovine  19866880447378
  misc_feature (1)..(1): n is a, c, g, or t
ntttaatcatggcatcatggtgggatggaggaggaggtaaggccatagtgggagctttgagacacaggattgttggtatcactggctcaatcctggcacaaactgaaaggctaatatgctgcttcatttcttttccatatctttttctttcccttcttttctcttgcctttcatatagtcagtattcttttcaagtaggacttttaaattgcccagattaagggtggatggtttgaagcaaagaatgggttgttaaagccataatttcaggtatcatgagagatgaatattgggattaagggtatatggaaaatatgcctgaaaattgacacgggggaatttttttttgttgaaagagaagtgaaaaacaaaaaggcagaagacagaggctggggcacatggaaaagtctaggcagtgacctgctgttgccactaattcacaaaaacactgctttaatgcattgaatctatctttgaagaattaggcttaatagctcctttcaatgcctgggagcttacgtcatcagtggcatttttttccatatatttttgaaagatgctctcatatggaatataaaatggtttagaaattcaattttatttatgagcagcgtcatattttctatactcttgctgaagaaacttagggtaaatggagggtcgagttaatcttttttttttttttaaccaaaagtgcacatcactcagcagagcgcttagttgttatgagattgaaaaaaagttcctccagcatgaggtgtggggaacttgttggattagaaaggatagtaagctttcttcttgaaataggctttatcaatctactttattatactttattggggtcattcatcaataatgaatcaaacactaggcaaaacttttcctgagagagttagaaactctctggttggagctgaaccctgggatctggggttgtgtctatgaatgctatttattctgcaaaattctctgagcaccttccatgggcccaaatgcaaagcattgctgggtcctgaaaatgtacttgtttggggcccatgtaaatatctctgctggaacaagggccatataatcactccactatgcagcactttattgtagagggagtggggatgcgctttcacggattgcaggattttttctaagcagagtttttaagactaatgaaggttggctcctcaggttctagctgtgagtgaacaagttggagtgtggttgacagttggtggaggtggcttggttagaagcttgcagagctcacctgtggtaacaaaggatctcgagactatttgggcatggatgctggtaagtatgtggatgcacagtgggagtgtgtaaaagtccttttaa

SEQ ID NO: 64133 - DNA, 1309 bp, Bovine  19866880476213
  misc_feature (1)..(1): n is a, c, g, or t
ntagtaaatctgaactgataaaatgattctgccaataaaaaagggcaacatttcagtgaatgtgtgtgaccacagttcatgggtgaccaatttctttcgtggcttttgacattactatctctgctatcctgagatcctggaatcccaagtcgggaatggttgagagtgaagggataaacctagatagtccttgatgtatttgttccaggcaaaatcagaaacgctaaaacttcctttctgcacaaattcagctgcagctttttcttagcaaatggaaatctttccaaaggggagaaaggacaggcgggtgccaataaatagaaactgtaaactttgaataaagtaaatctcttctgagctttgagtccctgaattccccaagcattggcgttgaatgaggggctatgtggttcccaggaagagtctgtgaggtgagaacacttgatcccacacacaagtcttcattatattgaaatactacccttgaaagaaaacccactatctgcctcctggcaatctaaatcttgtcaatacacttaagggactctttgtttagagtgtacaaagcttcctttcttccttctctcctttagaaaatcagcagacagaatagtcccctggcagctggggctccactgagggctgaccgtgctcacattcgtttttctggtttatgactccttctgaaacagggactggagtgaacgatgctcctgaggacacagcacactttgggaactctaaacgcccttcttcttgcggtttatatgatcttattttaattgaaaatggctttttaacggttttcttccctgctacaataaaaaaagttgccatcatcaaacaaaacggatggcatcttttgctttgatttgactgcattactttttgttaaacaaacacaaaatcaaattaaactaacaagcctccaggcaagggaggaaggggagatggttcccctgtcttcctgaggacttggaatctgtccctttgaaaactggaagcagcttgaatggttagggtgaaggcgagggtcactcagtcctccaatattcctggtgtgatagcagctcatgtgctcttcatgcaggttaccgtctctgagacacacctgtctgtctcagttcagttcagtcgctcagttgtgtctgactctttgcaaccccatggactgtagcctaccagactcctctggccataacattttccaggcaagagtgctggaatgggttgccatttccttttccaggggatcttcccaacccagggaatctgcatagaagttaaataaatagggtgacaatataca

SEQ ID NO: 64134 - DNA, 1247 bp, Bovine  19866880481886
  misc_feature (1)..(1): n is a, c, g, or t
nttttatctgccatgcttactcaagttttccaagtgccttcagcagtgtctggaatagaagaggtgatcagtaaataagtttaaaggatgagccctgattgtactatattaaaattgtcttccttgcccatctgtccaccacccaaactatgcactctttaaatgcagggagtttcactagtatgtccatttataatatctagcacatttcctgaaaatagtgggtttgtaataaatgtttgctaagtgaatatactcatccctggcctcactaacccatagttctccagggtttgcaatcacaccatatcaaactagaaaatgagtgcaagaatgttgttttcttagtggagaaatttcactataaattctcatggcatctgagatctccaaagatggagtccaatattaattgatatagtgactacagtcagccctccatatgcttgggttccatatccacaaaaatcgatcctcggttggttgaattcatgaatgcagaaaccatggataaaaaggactgactttacaacttcattttatgtaagacacttgagctttcacagactttggtatctgtggtaattcctagcacaaatccctcatggattccaaagtgttagtctcttgatcttgtccagctgtttgtgatcccatggactatagcccaccaggctcctctgtccatggaattctccagcaagaatactggagtggatagccatttcctcctccaggggatcttcccgaaccagggattgaatccgcgtctcctgcattgcaggcagactctttaccatctgagccaccctccaaggatgactgtatttctcctgcagagtcacttaagaggttaagaatttaccatagtccatttctttttttttttttttcctccattatgtatctgtaattggggcatttattttagtaagttagaaaactaaaggaagtcctggggattgcaagcttgaaaaataatatatttccttctgtaacatctctttttctttcctttctcagagctcttcctgccatgatgcagtgggtccgcacacagaagccaggagagagtggcatcaatattgtcactgccgactttgtagaacttggtgatttcatcagcactgtcataaagctcaactatgtctttgaagaaggggaagccaacacttgatggtactgtttggagtaccagtgaataagaaggagaagattcactgtattagatgtattgtctataaaca

SEQ ID NO: 64135 - DNA, 948 bp, Bovine  19866880542252
  misc_feature (1)..(1): n is a, c, g, or t
ngaagcagaacagaaaagagtaagacaagagaattaaggacattttcaagagtgaaactctaatgctgggaaatgagaacacgaggggtgacagttatgtagcctacccttctagcaactctcaaagtagaatctttacaacccctcgaccagttttttttctttcagaaaagcccagggcaggtcatagcaggagggtgcttggattaattctgtactaaggcagcctagttcctccttcctcctcctcctccacatggtaacagagaagtatagtcagagatgtgcattgagataggttcccatttgcccatgaggactccttcaagtacatcttcctctgcaccagccaagaagccgaaggagacctacaggaaagcctcccaggcaactaagactgtcattcattcactggagtccactttctttcatgaaataaaaattctccaagtgaatcaaggaacacaaccatcatttacaatgttgaccaaggataaacatgactgcttcataaaaattaattcaaaagaagaattcttctatgtaaaacataaaattagctgacgttaaagatggagtggtctaagagttgtccactcccaggatccataatgaaaaatagacacaaaacaagagcacatctaacaaagcagtgggccatctgtttcagtacctgatctccggaggtgactaatcctggcagtttctcaaggacgtttaactatctcctcctgcctgtcttcctgacccattttcctctcttaacagagcataataaaagcatatgatactgtagaaagtgtctggttgccggatatcatctgaaccagggtaaatttctctttcacattttcttgccttttagagtatatgatttacatattttccctgtcctcaatcttctgagactgatcctaaccctgagagacaggtaatagaatctataag

SEQ ID NO: 64136 - DNA, 773 bp, Bovine  19866880596133
  misc_feature (1)..(1): n is a, c, g, or t
ncttcctgaataagtattgttgctagcaggattgcctaaaaacacaattgatgactcatgagcacacatggctatgatatttaaaaaaaggctggggtatggagctccatttatacctattgtgctatttgcactaatgaagggttcacaatgaagaccagttcagcctggagagttctagccacacttgagggataaataaaacatctcttaacaggaagtcaccttattgagttacttgtatgaaaatagaaaagaaaaatagagtgttaactttttcaaatacatttaaaaaacaaaaagtatcaacttactgttgcttactgagttgatttttttttaaaaacaaactttattagaatgaggaagacgtgggcatgaggcatgatgtgacgtgattaaagcctgggttcagagaggacctctgagcgtcattcaggcccagattccacggggatataccgatttcagtggagctgggacaaggatgtcccatgcaaggagcgcacagacagtagtgtggaaacaccccacattatgcttgatccctctgaggcgaactggacttcaacctgatcctggagatgggaccatggagggggacactggttttctggggaagcctattaacactatccataggggtgctcagagcctccatgatcagtcagtagcttcccagggttttatccccaggggttcttgttttctctctgtgtgcttttattttgcaactcttccatccaaaaatcagggcagcatcagatctgagc

SEQ ID NO: 64137 - DNA, 3244 bp, Bovine  19866880606191
  misc_feature (1)..(1): n is a, c, g, or t
ntttcttctgattatgatgaagctcctttctaaggatcaagcaccaggagcctaaattactatttcccttgaggctgaaggctaatttgtcacattttagatcctctatttaaaatggcaaaaatgttcctactgcttccatgttgggtctaaaagccccacacatgatgccatcaccatctttagccatctccaagttttaccttctcaattatgcactgctagctggcttatgtctctctcaaaactgctatcatactaagtatgatcagaagcaaaggatttcaaataactgggcttaagattttactccttgtaataacatgtcaatgcaccaacatacgagtaattaagaggctttagtatacttaatccagtgtatggcacaaaagatattcagtgttttttgaacgaacgaatggggaaaaaaggggaattccattgggaatcttaggtgaatctcaaaaactgacaaactgtattactttaatttagtcaaaattagtgctaaatatatatagagagagtggatagacattacacttttaacaacaaactgtatgtttctagattttactgtgtaagaaaatttatagctgtagaaataaaacctcatttctgcttcatttttaatggtctattttcattcccagatttcaaagaaagcttgcacatgtcacagacgcttaattacagagctgaaattaatgatgaacattcgaactgctatagttgtcaggactccttgcacttcatacaactcaactaagacatgtcacaatgaattccaggtctgcatgtgaacaaagtgaacaatctgtgggcctccaaggaacgtttttctgtggggagctcttactttgttcccgttatttgagcaagacctacatctggtgtgaaagcagccacttgggttccaatgaacaaccaactctggttttggagaatttcaactaccagaattaattgtgccctaccaagacagaagggcttccctggtagctcagctggtaaagaatccgcctgcaatgcaggagacttcagttcaattcctgggctggaagatcccctggagaagggataggctacccactccagtgttcctggacttcccctagtggctcagacagtaaagaatccacctgcaatgcagcagaccctgggttcaatctctggctttagaagatcccctggaggaggccatggcaaccagtattcttgcctgaagaatccccatggacagaggagccctggcgggctacagtccatggggccaaaaagagacgaacgtgactgaacgattaagcacagcacagcacatcaccaaaacacacctttcagaaaccattttccatgtaaacagtacagctcagtgattcagagcagagtcaaggacctgagtgtaaaacctcactccactccacactagctggtcaaggatcctgtgtcttatccatctgctatacctcaggggtgactgtaagtgtccagcacttagcaagtgctcagtaaccttgaactgtttacataacatacactgaacatttctacaatctactagggaattctttaggctttcttggtggctcagatggtaaacaatctgcctgcagtgcaggagacacaggtttgatccctgggtggggaagatcccctggagaaggcaatggcaacccactccagtattcttgcctgaaaaatcccatggacagaggagcctgacaggctatatggggacctacatggacacagtccatggggtcacaaagagtcctacacaacttagcaactaaaccaccagggaatttttcaggaagtcttaagttcctcaatgaagttgaacacagaattacacagaaaatggcctaaacaaaattcccgagacccaaagaaccaatgaaaccgcaacccatatttgggagcaaaccatatggctggcggagaagacaatggcaacccactctagtactcttacccagaaaatgaacggaggaaatgaaaatgctcctgccattgacggaggagcctggtaggctgcggttcatggggtcgctaagagtcagacacgactgagcgactttcactttcacttttcactttcatgcattggagaaggaaatgggaacccactccagtgttcttgcctggagaatcccagggatggcggggcctggtgggctgccgtctatggggtcgcacagagttggacacgactgaagcaacttagcatatggctggcctaggatggtagcaccaacggtattcttgtggtaagaacaaggtatctagatgactccattcacactgagcttcaagacataacacagatcaaggaagaagagaaaatgagatgcagaaggattaaagaatgtcacagtttcaatattcaacagtaggttagctatgaagccaaaatatgactaactctcacttgagcactctattctaaccacgccaggctgagccttacaatgtgctatgattcacaaagcaggaacaatcgctgggtttttagcaataaaaaataaatcccaaaaaagagatgtagtgtagtgtggtagcaaaaaacactttattaggagtccaaagaccaggtgtttcattttaactcttccatttaattgtcatttggtcctttaaattctttgtgctgtggttttcttttcaactgccaagtcttctttcttccttacctgatcacggtaggaagaaatgttctgaacgtgcagtatagtgggagggattgactctacatccgaatttttagggtgagtggtgtcttgttcatctccatcaatctgctcctttctttctccatgaagaaatgtcaaaaaaggtagatgaccagacaccaagtgaagcatcaaaaaagctctgactggtcctcaaggcttctgatttttatatatatttccttctttgctaacttcatctaaccttggtgaacatttatatctctttcctccacctgcttctccagcttttctcttctccactgcatcacttacaggcctcctacaaaatctaggaaaccaccattttctttttatccaaccaaatactttctattacttgcttcatggtgatgtctctttaattctttagataatctgtgtgcaattttgctaaagtcttcagtataaataattctggttaaaggataataaccctcatgtcatcatttcaacaagcttcatgttatcataataaacttaatccaagataacaagttctcttttttaca

SEQ ID NO: 64138 - DNA, 1924 bp, Bovine  19866880624056
  misc_feature (1)..(1): n is a, c, g, or t
naagtctgttgagtctgtttctgttttgggtgtgagttgatttgtatcatttctttttagattccacgtttaatggatgtcatgtgatatttctcctactctgtctgacttacttcactttgtatggcattctctaggtccgtccatgttgctgcaattgtactgtttcatctttttatggctgagtaatattccattgtatatatgcaccacatcgtctttatccattcctctgtcaatggacatttaggttacttctacatcttggccattgtaaacagtgccgtatgtatgtaaacagggttcatgtatcattttggataatgtttttaggcatgttacattttaatatttggtcagggtgctaatagctgtctgttcttctcttcatcacaacaatatatttttccattttcagctagaaagtgatttgtcaggtgaccctctggcaccattaataccctgttctccaccaagctttcaccatgttttagcatccattcatgatcactggctgcatcagttactaaaaaaaaaaagagaaaatcactcagtcgtgtccaactctttgtgacccccatggactatagcctaccagactcttccatctgtgggatttttcaggcaagaatactggagtgggttgctatttccttctccaatcaattactaagttgggtgattttttcaaaatgtaaatctaatcatcatttctcttcagtaattttctataactacctaataaagtccaaaacacttagaatgccttccaagtccctttgaggtctgcttatccctccaaactgttctctcgtttctctcctcttcactctacacattctaaccaaattggttttctattggaaatatgcaagttatattgggaagttcacatattctgcctttagcgatgcatttgaccttctaaaaaatctgcttttctgccctttgtgtttattttttaggaggaaaaaacatatgacttgaagcaaagctgaaagtctctgtgaagtgagataataatgttttcttttaagctaatctcttttgcaaagctgtggcttcgcaaggctcttagcaggcaatagagggtctgcttctttgaagggataaaatgtccaaaacagtttcaccctgatttttagcttaggggaaaggaagagaagacatctgatgcactttctgtgtaactactgttgacaaaaagatttggcctgaaatttctgcccctccctccatttcctccagacgaggattaaagcgtagacaaatgataatgagcttaatttttcttgcagcaatttcagcttccactaaatttcacttttcatgttctttagctttctgaggtcattgctgttaacagaaacaatgattgctattattattatgactgtaatctagcatctgtacttttattctgccatctggaggacatcaaaacttaaataacccatgatgatctttttaggtgagagatcaactaactcttctgacaatagtcagcgtgtgtccctctgaggtcagtcctttggatcactcagtcctgcatgccaatgggtagcctctatctgtgttaataacagaatagcaggcaacctagaaactatttgttaaagaagagagtaaagtttgaagcaaacttacaacttttaaactaggagaccatgcctatatagtgtaccttaacaacaatcaacattttggtcaggaataagcaggacattcttctacagagttctcatttttttccaggttcctatatgttctgaggggtgggttttccagctccaaagtttgcttatctttcaccctatttggttcacaaaaaagactttctcaattcttggcacttctcttcagtattgcccttctgcgcctcatggacttccagggcaaaaatctcagccaattttaatcacgt

SEQ ID NO: 64139 - DNA, 4436 bp, Bovine  19866880662768
  misc_feature (1)..(1): n is a, c, g, or t
ncccagtgagggtgagtcttctaccatctcctactgtcagaattggagtcagaaccaagaactgtactcagaaacagatgggaagcccagggccaagtgagtagaatgttcgaaacaaccagatccattcagcatcctcttctgctaaacagtgacacagcctagcatatggcaggctggacaccgtgtgaagtgtgggaccatagccaaaggcagatctgatctggcttaaaagagacatgtcagttttcagaatttgagagttaacgctaggaagtgtctttccacgtgagaagagaccggataggttgaaaaagttcaagaaccattggtcctttacactgatctatgacccatgctccagtcagaggtggaacaaactccagaatgatctcaggtggcctctgcctgcaacatcttggagtggagcttgggttcccagccagagactgggatttgtcgcagcaatgagagcaccagatcctagtcactagatcagtggtcactgacaagggccttcagctttgcagaaaagaattcccacaaagatggaaagtggtaaaacaagtaaggtgtttattaagaggaaaaagaatacagtgcatgtggataggcccattggcagacttagggagagagtgagtcactgagtcacacccttgtgacggtttgaatttcttttatggggtatttcttctgggtttcctttggatgatcttgatttgcatggttcacagtccatatttggtatatctcaggatcctcctatgtgagtacacacatctcttagccaagatggattttaccgaaaaagcatctgggtagaatatcccttgatttaactccccctttagtctgcaaggagccttttctatgcatgtgtggttaggaggtctcttgattttgggaaaagaaatgtgtggtcaggccaggacccagccttcttccttagttgtcccgctattctcattgtggagtttcgattcacagggaatgaaccaccaatcactttaccctgggttgagaggcccatctgcctcctgcctcaagaagacaggagtagatgcacatctctttgcagatttaaaggcaactctcctagaaaagagaacgctcttacccttttggtgggaatgtaagttggtgcagccactgtgaaaagcaatatgcagtttcctcaaaaagacttaaaattgagtagccatatgaaccagcaatcccactcttaggcctagatccagacaaaactataattcaaaaaatacgtacacttctatgtttgatggctcaattgtaaagaatctgcctacaatgcaggagacacaagagttgagggtttgatccctgggtcgggaagatcccttggaggtggaaatggcaacccactccagtattcttgactgaaaaaaatcccatggacagaggagcctggtgggctacagtctataggatcacaaagagttggatacgactgagcaactgagcactatgttcacagcagcagtatttgcaatactgacacatggaaacaacctaaatgtccactgacagatgaatggataaagaagatgtggtgcatgtataccatggaatactactcatccataaaaaagaatggaataatgtcatttgcagaaatatgaatgcagctagagattatcatactaagtggagtatgtcagaaggaggaaaacaaataccatatgatatcacttatctgtgaagtctaaaatatgacacaaatgaatctatctatgaaacagaatcggagacctagagaagagactgctggttgccaaggaggagagaggttgggagaggtttggattgggagcttgggattagcagatacaaactggtatatatggaatggataaataacaaagccttactgtatagcactggaggaggaaatggcaaaccactccagcatccttgcctggagaattccatggacagaggagcctggtgggctacagtccctggggttgcaaagaatcggacacaaccgagtgactaacacacactgtatagcacagataactgtatttatatcctgtgataagccataatggaaaagaatataaaaaagaagatatatatatatatatatatatatatatgtatatgtatatgtataactgagtcactttactgtccagcagtaattaatgcaacattgcaattcaactatacttcaatcaaaaataaattaaaaaataaaggcaacaataatatgcatgggcatgacaaaataatggtggtatcatttcggatgatatattaatactagatatctactactcctctttctttctctaatctgtatttaataataatggtacccatttttactttctacacatatctcattgggctattacaatagtcaaatgaaagaacaaaataacattttttaagctatagggctttctacatgtaacagttgttattattacccattttgtgggctgtctaagggtctcaggaaggcatatccatttctaccccttaggacagctattaccctgaagaacagttccattgctgatatctgcattacaacgtgagttttcccatagcaattgggtagataaggtgatgaagcatgccttttcagggttccagctgaaatcctgagtcagttggaaaaggtgagtagtttcctccttccaccccaggaactagtagctagaagcagaatataataagtcttagctcaataccaagagaggggttcagggtgctgtttgattagaccatgaagaatactcctttgttcttgttctagctagcaaggcaaaaagacagcgagtgactgaagaatcaacaggagagcagcaatcaggcctctgagaaatccctggagaaatcccaagggaagaaaaaaaatcctggaacagaataatacattaatattaactactccctgattagcagttaattgttgcaaatgagtttaccaaccttttccctgatgattaggagagtgctgtcatcacaaagctgtcaagctatggcacaaatctgtactatacagaactgtgatgactggacttctgtgaggaagccacagatatttggataaggtgactctgtgcacaaggggaggttggccagggaaatttgcccacagtggagcctgatctggtgcacatcagactagctgaacagactgagcagggttttggagattaggatatatgggatagagaaaagaaaagaacctcaaagtattgtttcatctcactacttactaacagtttggaattatctatggattggtttttagaattcaaatagcacattaaggtttccaaacttgagctctatcaaacagacaacaaatgtaattgcctcttcattattagggggaaaatgtcctgactgactcagggtagtcttttcaaatggtaataaaggtatatggcagtgtagtattctagaagccaatgcataaacatggcatctatttctagaacttcagctttacctgatatttaaagaaggaagagattattttcatcaaacacacacacatacagacatatattttaaggagaacaggacaaaatttgcttctcgttttaagataaaacatgaagcttccaaaactgtcttctctgtggcaagctactctaaacaacacacagacccacatccctctgttcaggggatgtgggccatatacagctattagaagtacctggatggaaagctctaaggaattctagtgatgtaaagttctacacggaagcagagagaaagaaccccccaaagtcttttataaacttggaaactgaagacaaaaaatatatgagttttatttttcggcaaacaatatttactgtgtgcctggtggtagcctaggcaatatcctaaagtcctccagtttatgactaaactagatcaagggctcctaaagtggacgtaatatcttattgttccctctcttcttcctgtcacataccttccccacatcttccaccccagcttccagctgaaaacacattcattcataaactatctgaaccatttgttattctgacagtgacactaggtcattcacactctctgttagaatttgaccccccaaaattttgtcatttcctatgatacccaacaaaatgatgaaccattacatcccgaaaggttacactgttcatcgtaaaagttgccttgtgtatggaaagcagaagagtcagagaggggccaagactgaactgtgggcagcagagagttctgggttctgccaccttggggcagtgactgaggccatgattaatggacagtggatgttactttatgtcattattagttccctcttctcctatgtttggagaagactcttgagagtcccttggacagcacgcagattaaaccaatcaatccaaaaaagatgggacacgaaagataactccccaggtcagtaggta

SEQ ID NO: 64140 - DNA, 1362 bp, Bovine  19866880700610
  misc_feature (1)..(1): n is a, c, g, or t
nttacagtagccttttttctttcctcctcctttctgccctattgttttggtgtatgaatgatcggtggtgtttgtactgttaaactgcgtatcagccaacaacagccagaatgcttctgaaaacgaatttaatttattcacagcacagtgtgcagccagatgatgatggcaagttaatgggctttgccttaatgagataactgtttgccgcccaggtttagaggtttatggtagttttatttgtcagtcttccctgagtgcagagaaggaaaaaattgtagctttacgctgatatattgtcaggtccatttgcagagagagacagatgttatgacctccttctgctgctgtgttctttgagccatttcaagttttcttctctattcttggcaattaaatgcaacatcccttgttgttcacccatgtggcttagatgaggaggctgttcaagcggcataatccgtggaggtgcatcttcattctagtatgctgttatcaaacagggtctgccagtgtactggctctggctctttgcttcctttcttctttgctcctgatttccctctctcttttaatccagcaggttttatgatcctggaaataatatggcatgagagcctaagcttcccaaagaaagagaaattagcatgacactttggctttttcaaatattttggcctagtccttttcctctcaaattctttttctccattcacttcaattaccactgaatctttaaccctggctagcaaccacctcttttccagtctgcctttctggtaacttattagtgtttagcaatgagaagaaaagggcaacggttctattaacacaaccaaattgattcataatcagtcatgaaccaggagctgggtaaggcttttttacaagcactaaaggttaatagaaccattctccagcccattttccaaaccaaccttcatgaagtattctgacctccacctccagacatatagccattgcataagagcttttggcatgggtggcatgtaggtggaagttatttatgaacattaatagctttttcaactattgagcaattattagagcacccctacaggtagccctagctaagttcagaataaagtaattatatagttaatttagcatttatctggaagacggactttcaaattaaaaagcttgtttgttcagttgaaactagcatttatttattctatggggatttttacacaggctctatttgccagtatgaaacacccatgtgaagctcgttttcagaattgactagttgagtcagatcacagtccaatcaatttgagaatgaacagccagctggatagaagccatactttccattactggttaattgctttgggg

SEQ ID NO: 64141 - DNA, 1229 bp, Bovine  19866880748588
  misc_feature (1)..(1): n is a, c, g, or t
ncctaggtttttctctttgttttctttttattctgctgaggtttggtggagcttctttgaatctgtgacttaagttcttttggcaatctttaaaaatgttggtcaatgttttgccaattaaagctccagcctcattctctatttcctcttcttctctaacattttacacagatattagatctttttcactatgtaccatgtgtctcttatacacttcccagtattttttattcctttattctttctgtgcttcagtttggatattgtatattattctatcttcctattcactaatcctctctttcagcatctcatctactcttttttcatctattgagttcttaatttcactttatcatatgttagaatttctctggttaaactgtctatctcatcgtctattttcttgaatgtattcaccttttctaatggctgtgtctagtgactccaacatctggatcatctatctgtcgaatattgtggcaataatttgaggctttttctgagggcctcttgagggaagttttcttttttttgtggggtggagtcagattaaaaacagatcaccttattcctctcatagaatgagatgtttcagagatgggttttcatctttacaaaggcttgtcaacagatacatgtatctgtaactgaatgactttgctctacccgtgaaactaacccagcgttgttaatcaattttatctaatgcaaagcaaaaaactttttttaaaaaagacttacctacttctgggtccacccttatttctgcggtagcccttctggggaactaactggaacactaagttgttagctaggagcttttctttcctgctgccttaatttctaatttttgtttcccgaacttcataaggcagtttaagcttttccaatcttttcagactcttcgctgtcactttgtatttactttctcagtgttttagctatacaaatctcataaattagcaagtacctcaaggagaagaatagcatggaatgtcaagtttaagaatataaagctaaccgcattgtgcttctatttttgctgaaagttccagctgccttgtgtgctctttgatacccaccctcaaaccttttctgtgaggtgaagtggatgtggagggtcatgtgaaaatggatatgttatccagctctcctggttgttgctttctgtgaccacttttacctgcagcagtctgcagcaccattactgaagcagaaaattccct

SEQ ID NO: 64142 - DNA, 2549 bp, Bovine  19866880869084
  misc_feature (1)..(1): n is a, c, g, or t
nagagaattgctgtgatgcaaagccacctcctgagataggtcgatgaaaaaatgagaagcagagcccctagagggtcaaggaagcatttgctttcctttgtatttccttctccctcactttgaccatataaaagaatgcagtgggctgaataaggtcccctttccagtcccaattcctatccaaccggaacctcagaaagtggccttatttataaatatgaatgctttgctgatgtaattagctcagcgtgttgagataaaatcatcctcgatttggggattcgagggctagtgtccttatgagaagagaggacacacagaaacccaggtgagaaagccatgttgaagacaaggacagaggctctagtcatgttggtatatgccaggggatgccaggagccatcaaagccagaaaaagcaaggcaggatcttcccctagagcttttagcaagtgtgcacccttgatttcagacttctggcctccagaactgggagaaaataaaattttgttaggtttgtactagtttgtatagcagctctaggaaactaacactgagagtgaataactctgtaaaactttctgagacagccggaaatccccatgaggcctttgtatctgactacatacaggtggactggatcagtcattaaacacctcatttgttcctagagagggaccaacagcagataactactgtgtgggtggggtgaacctagccaagtgaaaatctcattatatgcagccacattaagaaacattgcacatgtgtgggagtagtatatggtaaaacattaataaacgaactgtgtatcacttctctggctgggaactgacatgcaggcaaattctgatggagattaaaagaaaatacaatgtgtctgatggcctgagtgttgagtggagaagtaaacctggctttgggagtctcccttcataaacctggtgcagcacacacagctaatagcagctcgaggctcccaagagtaggcacttttgaaagaaaggtgaagaaacccagaatgagtattgagaaacttatgtaaaatgtttttaaaaaaatgtctgaaacaagataaatgtgacaggtgtttaataaacataaattcccatcctggtcccctccctatattactaagcagagatcaaccctacagaattatatataggtagctcagctggtaaaaaatctacctgcaagtcaggcaacccagtttgattcctgggttgggaagattcaactggagaagagataggctacccactccagtttctttgggcttccctggtggctctgatggtaaagaattcacctgcaatgctagagacctgagttcaatctctgagtttggaagatcccctggaggagatcaaggcaatccactccagtattcttgcctggagaatccccagggacagagaagcctggcaggctacaatccatgggctcgcaaagagttggacatgactgagggactaagtacatatgaaatacttttggagctatgcatcatttatctcaaggtcagagcagggtcatatctgaacaagtaaaggccaaacaactgctttaaattctctcatctgcttctgttcccctctactataaaattaggagtctcttactctttgaccccaagaaggtgaaggtgaagtcgctcagtcgtgtccgactctttgcaaccccatggactgtagcctaccaggcttctccgtccatgggattctccaggcaagaatactggagtgggtgaccattgccttctccaggggattttcccaatccagggatcgaacccgggtctcctgcattggaggcagacgctttaacctctgagccaccagggaagcccatatctgtatataccacgtcttatttatacattcatctgttggtggacactgaggttgcttacgtatcttggttaactgtatacagtgtggctatgggagatgcatttgtctttttgaattaatgtttttggttttttctggctatatacccaggagtggagttgctgggtcatatgttattgtttttaggtttttgagaaacctctgtactatttttccatagtggctgcaccaatttacgtgcccaatttatgtgcatgagggttaccttttctccacaccttaaccaaaattggttgtgttccttttcttttttaaaaggtaaacagttcataattattggaaggagttttttctttctttctctttcttgtttcttttcttttttttgtagggtcggggatgatggccattctgacagctgtgaggtgatatttcatactttgatttgcatttccctggtgattggcgatgttgagcatcttttcactttggcagttcattttggatggttaatggagagaaagaaaacaggccttctctctgggggcagataatcaggatttgtatcccaaagatgtacgaccttgagcaatttgcataacccacagtctcagtttcctcgtccaggagtggggacaaccactgcagtatcttaaggaataaatgatagaagggtccagcaggttcaggcacc

SEQ ID NO: 64143 - DNA, 3037 bp, Bovine  19866880999627
  misc_feature (1)..(1): n is a, c, g, or t
ncatgcccctactggtggtgaaacttgaaaccgatgggaggcacttttctttgaggaaaagttgcaattttatatctagggatataatctgtgatattttctgattacatataaaataataatataaatcttggtttaaaaaaataacttttgatttcttaactattatcttgctgctgttgctgctgctaagtcgcttcagtcgtgtccgactctgtgcgaccccagagactgcagcccaccaggctcccccatccctgggattctccagtcaagaacactggagtgggttgccatttccttctccaatgcatgaaaatgaaaagggaaagtgaagtcactcagtcactaatattcatttctattagagcttaagtacctttttataaatttgttttcaggcttcagtgtgaaatgacacagcatccttgtgatgcttctatctttaaaacatgattaggaactatgtaataaccagaacccaagtgtccaattctcctaaataaatcagaattcttgatcatttgactcttctacaaaagaaatcaggaatttattttaaaagacaccaagccatccctggggtcagtagaatttcagtccctctattcttatatctcataatggcaaatagttatatttaatgtgggttccctgagtttttcctaactttaaatgagcagatgtccatcatgatctgctttttaagagaggagataggacatatgtctttgaaaaggattttcagtaagaaagtcttcaaaattttttgcctgacagagttaactgaaatcccagagatttacactgtgatgggctttccatgttgcctcttacatttcattacagttatcctttctactggagtaatgtttgctcactgaatttgatgtctttgccattgagaacagcatcaaccttaaagctgagcaaaaatgattgggggaagtctctggcccttgtcttggtttcgtctcaccctagggaagaaattattctggtcactgctgctgtagcccagagaataatttctcattcgataagctatactcatcatgtatttacagcaaagctgctaaaggcttagagttcaggccagttaaaggactatgtgaatctttaatcaactatccaggactttaatagttgaagccctataactaaaatgaagagtgatgagctgtactttcttcctgaaacactctcactttccatctctttctctttaaataaaggtagagactttagacacacagatatacataataagagaaagaaagagagtctgaggtgtcctataaaactggaaacatacaaccatacacacctatgtacatatacaaacactacacacatgtatataatatttatgtatatgtatataatacattctcatattttatatgtaatatataatcttatagtcatgaaatatgtgcatatatatatatgtgtgtgtatatatatacttctctgagtcacaataataatattggcacttaattttaactgtggtttaagatgaaacacacttagaaaaaatctcattaaaatggaattctccagtgggtgtgcttgtctgtctttgcccactctcatatgcttcatctcatgtggatgaatccatattttggcctccttccttttcccctttttagttcttttccccttacttcgtttgccacaatgtagagctagagtttaggcttaattttatttgctttattcaataagagttatatcccttgtcattaatttaaaaaaaaaatgactcgaatacctctgagtactttctctagtgcaagaagaataaaacaaaattaaattgctttttatttgcatctcttgatgtattcctcaattctgcaatgttccatggtcaatttaaaaccttgaataaaaagttgaccttgctctagtgtgcaaggtaaaaagaacttcagggacacagagaaaacagtaaacaattaaaatatcatgttattacaacatggtaattttaaatttcttttgctgggaagtcatgttctgctctgactgaaaaaataaaagctattcacccccactgtttatcagtatgacatttttgattgacactgttgatctttgcccagtcagagtagctgaggacatttctgcaatactcattcctgtgccacatcaaactcaggtttgagactgcaagtgcttcagcatgaagcaactcctttgtcagtgtggatagggtcagacgtaagctgtagggcatcttgtggggaagaaaaggctggtacagaaattcactgataaagccttgacattttcaacaccgcatgaccaataccacggctcacaagagagattcatcattcaaatcttgaaggattcccctgtaaccatcagaaactgaaattaacgaggtttatagttcattaattatgctatagttaatgaattggtcacatgcaatttaattttcatttataagtcatagaagctagggacttgcccggcggtccggtggttaagattctgcctgccaatgcagaggatataagtttgatctctggtcagggggctaagatcctacatgcctcaaggccagaaaaccaaagcaaaacaaaaaacccggaagcaacattctaacaaattcaataaagactttaaaaatggcccacctcaaaaaatcatttaaaataaatcatagaaatctaatgaaagaataagaaagggttagggaaccattaaattcctcacacggcccaaacacttgactaacccatttataagaacaatgccactggaagaagaatgagtcatatttattcagcctaatcaaaacagccatcttttttgttagaaattaaaatgccaggtacacacgagggcctcaaaccaagacatttttttactcccaatctttgatttctctctttgaatgtgtcaaactattgaaaaaactacaaagtaggaagcctcatccgcatctactcagcttcgttccttggtgagctgcacacccaggtttatattctagcatcacatactcacgtggtgc

SEQ ID NO: 64144 - DNA, 2204 bp, Bovine  19866881013753
  misc_feature (1)..(1): n is a, c, g, or t
ncctcctctcttcttcccctgcctgggaagctgaagtgtacggaccgcatcaatagacttccttgtcctctagcttcaggagtgtttgatcattgtggggttctggcagaaaaggagggaggaaagagagtacagttggggtgtttattcccctggctcactcctaggcatctctgaagcccctagaatgagactcaactcctcctcaactaaccctctgtcaacaggttttcataaatgctcctctctcacaacttctgacttaggcgtggaaaaaaatgtaaaccagttcagttcagcttctaccaattcaggaatactgccctgtcgtgtgcagttttctttactcgacccacatttctgtaaatagtcccaccaataaagctcctctggtcctaatttaatcatgccatctgtacccaacacttagtaattacttcagctatatttctacaaaggagtgatttcaagtgggatggtgttcttggaatgcaaatctagaaacatatttcaagaattagaaaagcagctgcttttttctctgtcggtattgctttaagagtttatgtctctggggcttccctggtagctcagtggtaaagaatcagcctgcctatgcaggagagactggttcagtctccaatccaggaagatcccacatgctacgcataactaagcccatgcgccacaactactgagcttgcgctctagagcctgggagccgacactactgagcctgcgcgccctaaaggtcgtgctctgtgacaagagaagccatggcaaagagaaatgtgtacaccacgactagagagtagcctctgcttgcagcaacgaagacccagcacagcccaaaataaatgaacgattaaaaaaaaagtttatgtctcaagggaatttcagccctaatctcctcaaactctaaatcctcaggttttgttattttgtcccattttatacagaaaacaagcagccttaagtaatccttcagcctttctcaccagccagattagaacactgcccgacaccaccaatggtcagccctggtgatccaggcaaaaacaggcagcagatggactggattgaaatgtgaaggaccttgatccttggtcagtaacacctttgatccaacagagactagcatctaagaaatcattcaatctgttttgaataaaataaaacagagaataaaacagagcttacccacattcatagggcattttacaaacacatcttgaattctgcagtttctcccagggctgacatttaggcactttcggtgtcaaaggtgcttctaaaagaaaagaataatggagatgtgaccattaggagaagagcttctttgtagtaaacaaggattatttcaattgttgaaccaggcaataaattcttataatcaataaattaataaagctataaagcattttataagaggtacagcgtcacagatccaacaaatgacgtctttggtcataatagccaccatttcttgagcatggactcttgatcctgccctttttatatgatattgaattcttcttaataaatagccatttaagagatgaggaaactaagagtcagaaaagtcaagaaattcatgctagttaacaaattgtccaagccaggatttaagtctatgtttgtctgaattgaagccccatggtgtaggctccctttcttcaaaaaggtggagtttaaaatatcatattaagagagtagcactgaaacataaacattacacatgtaaaagagatagctagtgggaatctgacgattgatgcagggagctcaacccagtgtgctgcgacaacccagaggtatgggatggtgtggggagttggagggaggttcaagaggaagggacacatacatacttatggctgattcacatttttgtatggcagaaaccaacacattgtaaagcaattatcctccaattaaaaatttttaaagagaaggtggggtttaaaaaccatgtgttatttgggtacattttgctcactacacctatcacgagacagaaagcataccataagctgacctatagaagaagaactcttagtatctcaaggatgactataataatctcttacatgtaaatgtccaagtggtctcccctcaacagtgagtaaatgtctggaggtatttacatagataaaatcctttccttcatgttttctacaaactgatagaaagccaattatcat

SEQ ID NO: 64145 - DNA, 2723 bp, Bovine  19866881026543
  misc_feature (1)..(1): n is a, c, g, or t
ngtcccgcctgctgctgctgccgctgctgctgctgctgcgaaatcgcttcagccgtgtccgactctgtgcgaccccgtagacggcagcccactaggctcctccgtccctggggttctccaggcaagaatattggagtgggttgccatttccttctccaacgcatgcatgcatgcttagttgcttcagtcctgtccgactctatgcaaccctatggacagcagcccaccaggctcctctgtccacaggattctctaggcaagaatactggagtgggttgccatttccttctccaatgggccctgcctacaagccactaattgtcaagaaaggaaagttagtgaggggattcagaaaacagtggagtgatggtcatgaggtggagagtgaggtaacaggtagatcctggctttctcccggaagccctccagctcacccaggcttgggccagcaggtgagccggcgtgcccagggaacagactgagggctgtatcctgcagggctccagagccctcaccaaggccatcaactagccttggcccaggccttgaggcagcagtgaacctctcccccaatccttgtctctgtggccagatagcagtggcagtctgcctgggtcgcagtttgtgggacctgatctcccccctctttgggtggcctgaggagcttgagagctggttggattgggtgcctggctccttcagtgatgatagctgggcagagtctgggaacctggccctcagggcgctgccaactgagatctgcctcctcttagccaggactgagaccttggagggtgaaagttgtgccttgggacctttccctttcttgtcagggcagagaataacattcatttggtagagacttacagccccatccttacctgacaatgacctgactttaagagcaaaggatctgtcaccaagaagtttgtaacaactaatcaggaccccccctcaccttgcctataaaagggctttgctgaaagttttcagggttcttagggcatgagccatgcatctccttgcatggccctgtaataaacctttctttgttccaaactccaatgttttagtattgtttggcctcactgtgcatcaggcacaaggagttgcattttcagtaacaatatcacagacagtgaggagggtgagggaaacagctttctcagaactcacaggacatacaaggcagtgtctctgttttcctttaatttttaatcaaaggcacgtctctcctgagagaacctaggctatccaggggcagccagcctgggatggcaggacaaagctggccagatgctggtatgctggtatgtgactgtggcttccttggaatgcagtcctgggaggtgacggcagaagcgcacgctcggggaccgaggttcactctcgggctacattttgacctgctgcatgggtctgaggctcggggagacggcaaaggggctccccgtgctctttttgatgtcctccactgttaggccgtcccagagctccatcagggtcagccctgtcttcttgtgcacgtcaaacacggccttctcggtgatgattcggtccacgcaccgcttcccagtcagtggcatggtgcacttctccacgatcttgggttcgttggccttgttgcagtgctccatggtgactaccactcgagtcttggaactggacaccagatccatcgcaccccccatgcctgtcaccttcttgccgggtatcatccagttagccaggtcaccgtatttggaaacctgcatggctcccagcaaggtcaggttgatgtgtccccctcgaatcatggcaaatgattcatcgctagagaaaaaagagcccccgggaagaagggtgactgtctgcttgcccgcgttgatgaggtccgcgtccacctcctcttttaatggaaagggacccaagcccaagatcccgttctcactgtgaaggtgcacggtgatgttggggctgatgtagttgggggccagaagagggatgccgatgcccagattggcatacatgccatcctcaaattcaagagctgcccgcttgatgatccgtgtccttatgttatctgaagacgtgcaaatttcatcatcctctttccggacggttaaacgctcaattcttttctcatatttttccccctgtattatgcgatctacataaatgttaggaacatggatgtcttctggagcaaaggaccccacgtccacaatttcttcaacctccaccacggaggttctggcggctttgcacatgggcacgttgaagttcctggcgctggccctgaagatgacatttcctgcccagtcggccttccaccctttcaccaaagcaaagtcagcggtaatggcgtgttccagcaggtagtgctgcccatggaactccctcacctccctgggctggctgaggatggcgatgtggccgtctggtaagtacctgatgggtgcgcctccctcctggaccaaggtcccgtaggccgtgggggtgtagaaggcgggcacaccggcgccccctgcgcggatgcgctcggccagggtgccctggggcgtgatctctagctccagctcacccgccaggtactggtgctcacagagcgagttctcccccaggtaggagcagatgatgcgggtgatctgcttggtccccagtaaaaggccgagaccgaagctctccacccccacgttgctgcgcatcacagtcaagtccttcacgcgggtcttcagcagcgc

SEQ ID NO: 64146 - DNA, 1011 bp, Bovine  19866881036841
  misc_feature (1)..(1): n is a, c, g, or t
naaaaagaaaatacaacatttccttcctttcaagtcccaagtgatttctgaaacagaatcaattactaaaggaaaacaacttattctatctataccagcagaaaaaaaaaaaacagttatgtaagacatactctctgtagcaggtgggaaattcaacacagtctttcaaccccactcagcaggcactcttctgggactcaactacttgaatatcccatttctctactgcagctggggaagacatgtgcctgagtgctagacaacggaagagagggaggagacatctgtagtttcaggttctggcccataaaaacctctcacatagaatccttcatgctccttcaagttctacaatctggacattgacatcatagatgactgagcttccttcagcctgggtccttcaatgaccatgtggagcagagcccacttattcagaaacaaactgcattgttcaatacaagtgaaaaataaacatataagatgctaaaccactgaagtcaggaggcttatctcttacatcagctagtgtgactaataaaatggtgtgttgtccaaaacagttctatgtaagggacagaattctgcacagaaacagaactaactgttacagctgcacaacagtgggggacctgaggcctcttaaggagacgttgtaccactgctcttctggcggggaggggtgtgactgtcctaggcactgtaattacctgtttatccaagtgtcctacacactgcttgacacttgatagagttgaaatacagatctcatctacatcttcatctccctcctagaaaccctatatcctattcaatatacaaaataaaaagctgataaaacagagaggttaaggagctaaaaatacacttttaaataaatcacaagagagaaagtggtatttagagaaaaacaggcctataataaagaagagattctgggcacgatgaaatactgggccagggtgacacaaagtgggctttctttagaatctcatcagcaaatacacattt

SEQ ID NO: 64147 - DNA, 831 bp, Bovine  19866881118530
  misc_feature (1)..(1): n is a, c, g, or t
nttagttcctcaaagtcagaaaccaagtctccagctctaaactcgggttgtgtggatggagagatactgggaaagaaaaggcattcttgaaacacacaggggctgtgacaagcgagctccagtgcctggactccagcctcctttactgaatgggaaggggcatagtgggctggggggtttccagctgggaatggccatgtcggggactcacccaagacatgcatctgtcatcacaggagcaggatgatgtgaggctgactgccatcctcttatttgagaatctggcatccctaacaggaagaaggtggaagattttttttgctgaagaaataaaaaagagcatgatttcattccttctccacctctgggaccccaatcccaagattggaactgtaagtggcccttgcagagacagctgcacctcttcctctgcccgtagccaagaggtgccaggaatcttggtctggctgggccagaagccatatctgaagacaccagtctcaaatgaacctgaaaaccagttatcccatcttgggttcttttttggccatcacttcctgagtttgcacttccatctttgaaactgggaaggtggtagcactgactgtccagcccttgcatcactctttactgctcttttcccaacatacctataagcctgccttcccttctggaaggggaactagcattatgcactgtgacacagaaaactctgttttccaggcttgccgtgatgtcctgatcatctgcattccttttctgggtctccaggaactctatggggtattagaccatctcctgggatgttcaggatctaccaagggccaggga

SEQ ID NO: 64148 - DNA, 1905 bp, Bovine  19866881379060
  misc_feature (1)..(1): n is a, c, g, or t
ntcagactctttgcaaccccatggactatagaccatggaattctccaggctggaatactggagtgggtagcctttcccttctccacgggatcttcccaaaccagggatcaaacccaggtcttaagcagattctttaccagctgagctacaagggaagccctgtaagagaaccagtttcacccttctctgacagtgtcatcattttttatttttttgctaattttgttgcagacaagtggtgttgtattgtcttagcttacatttatctaataacaaatggaggttttcatatttactgaatacttacatgttcctaagctatatccaggtttctttatatcttcatgtctatactatatgtcagatagtgagaaaggaaaaggaaggttccagtgtcatttactctgtgtttataggtggtgtttagtcactaagttgtgttccattcttgcaacttcatggggagtagcccacaagactcctctgtccatgggatttcccatgcaagaatagtggagtgggttgctctttccttctccaggagatcttccccacccagggatcaaccctttgtctctggcattgcaggcggattcttgccagactgagccatcagggatgacacatgacatgaaaggacatatgacatcgataaaactcactgttccaaacttagaatctctcttctctctctcagtcactcacacacacatacacacataacttgagtgctgaagaaaacaagtagataaatgttagatcatacaataaaggattaagtaatgccaagcaagtgatggtttgtttatcactgtaataagttagacttacagtctggttttatgtccccaatctttctctactcctgttaccatctccttcaacattgcatttccatcagaaatgcatctgaccccttcaagccccttcagatcctcagttctctggaactcaactgagatgtgtgttgtttggcgatataatatccacttctccacgtggttctcatttcagtaaattgaaacctcaactctcactgaatgaccatcttaatattcttgaggagaatattcggaggctgctgccccttccacccttggaaaaactcagaaatgagggcgagacggacaaagacaaggagcacatccaagtatgtgggggcgaggccagaggagggtgaagaaccgggtagaatgaatgaacttgaatgaacgcgtgctctcagcttcactgtcactcacttcatttcagtttctctacgaacgatccatggatgctctcggaaagctgctgaggaccatgatgtgggataacatgaaagcagaggactgccaagaaatgttcaatgtgagtaggtcccatggatcctaacctgtgctccaggtcaccctccaaactctgcctcctcctggggactcatctagcctgacccacgtagccccccagcaacaccacagagccagcccacttacacagtgtttgtggggaggccagcaccctatttcagaagaggcagagtgagagcaagagaatgagaatggataaatatgaaagaatatgctactggagatcagtggagaaataacttcagaaagaatgaagggatggagccaaagcaaaaacaacacccacttctggatgtgactgttgatagaagcaaggtccaatgctgtaaagagcagtattgcatgggaacctggaatgttaggtccatgaatcaaggcaaattggaagtggtcaaacagaagatggcaagagtgaacatcaacgttctaggaatcagagaactaaaatggactggaatgggtgaatttaactcagatgaccattatatctactactgtggacaggaatcccttagaagaaatgcagtagccatcatagtcaacaaaagagtccaacatg

SEQ ID NO: 64149 - DNA, 1403 bp, Bovine  19866881387704
  misc_feature (1)..(1): n is a, c, g, or t
naataacttttcaaatgggctcaatattctcatagaatttgaccattccttttattttaatatttatttaacataaaataaaattaaatactttagcttcctgaataacttttatttacttattaattatggcagagattacttattgtctgacaatttataatattcctaatcttttattatttctcagtagatcttaactgttaatacagtacaaattgtacatatggaaaatgtatatccagcatttaaaatataaattatggtcatgagcatgtagttgattctgattgaggcaatgattgtgaccattttcaaaaacacaaaaatgataatcatctggataaaaaaagattcatactgcaaagactcacatttttcagataccttagagattatctagagtgaccagatccctcattttgaagacaaaggaaataagttgatatgcttaactatgatcactgtttaaagaaaaatttacacaggtctaaaacattagttaccatttcagtttatttaaagaatacatttttgatcccattttttgaaagtatgttaaagttttacagccactattttctctttcttggctctaacttagaccttttctttcctctttttctatttcctctcttttagtttaatatatgttatgttatgaaactgctcaccctattcaagttattagagatggtttataaaaatacataaaaaataaaaacttaggattaccagtcaaagggacaataagggcatcaaaaagatgagacttgcttcttcagatccttctagcccaataaagtagccatttagtttgtattcattgagctggacacgactgaagcgacttagcagcagcattgatatactatacatagactgcatagtagatactaaataattactttttttattgacctggatttccaatagcttaacatttctttcagactttggtactttgaagaaactatttttcacttacctgatcacacttattagtgtagaaaagactaatcaatgtgagatatagagccatgaaaacatcaggattactttgaaaaggttcacctcaagtcttctgataatcatttcctaaggttttaaatgagttgtttgcattaaagttttagtgtgtgattcagtgagaaacttcttttcctaactggacatgtgctttattttacagggtccatacccattaaaaaatgaagttgatgcagatctaatcaatgcaggtaaaataactcattacatgttcttctagcattttcctttgctattagtttcgttctctgccaaatgattttagagtaaggagttgggcttgattctttgatgtttcctggagaatatgcactgtactttacttggaggaggcgagagaagcctttccagtg

SEQ ID NO: 64150 - DNA, 2465 bp, Bovine  19866881406043
  misc_feature (1)..(1): n is a, c, g, or t
nttaagacttctttccgtttgtggtctgattcccaaaggaaaattccaagtagccctggtttccctgctaacagagtcaggtataaattgtgctcctatatttccaaacacctgtatccaagcaacatattaaagtgtgctgccaactgatgtatgtatagtcggtaggtacacctgactttccagaaaaatggttaagagagaaaaaaaggcatcaaaagcaaaattaaaatcaaaaggaaaataatactgtttttttccctttttaaaaaattttctctggtaaatctgcaaaaaatactattattgtgttctaaattggctattgttgtttaataagtttgtaatgtctggaaggaattcatagtttctcactaaatgatacactttactggattcttctatagctagctattctagcctgaaaaataattcaaaaaagtttcttggtagtcatcaaaataccttcttatttggcaagtagaagagactcataaaggcccaaagcattgatcatgcacaagagaatgtggaacaggaaactcaccagccaggactctaagagtaataacatgttagcatgttactggtgtctggtattccagaacacagactatattcctagcacaatccttcttaccttagtggatccagaaacatatggcataaactggcagttttgcctggaaatccatattcacttcagattaagctcttctagacacatgctaagacacatgccagctctatgcccttgggaaatatttttcaccatcttcaagccttagatacctcatcctcaaagcagaaataatagtggaagggagaatggggagttactgtgtaaagggtacagagtttcagttttggaaaattaaaaagatctagagatggttggggggtaatggttatacaactttgttaatgtacttaatggcacttaaaatgcttaaattgcaaattttatcctttatgtattttaccacaattaaaaaaaacaggaataataaaagtaccccatgagattgttttgaagtctacagagataataaacagtgtgtgtggtgcctagcacatagcaagtactcagtaaatggtcattattagtgttgtgattcatagtaataatcaaaattggcttgaactcctgcagagtcacaaccagtatcaatgcttatcattgtcggtctcatcacctttctcctccccaccacactgcaccttcacatccctacccttctcttcactgtttcccttttccagatctgcattctttccaacctccttaaattatcaagcccagtcatcgcagaaatccaaaaaatgtttggtagattcaagcccttctgcttaagttgcatataaaaacaatccttaaaagaaattaaattcctctttcagccaacaaaatgatcttcaaagtgacttgaaagctttaacagttgcgagactagccaaggataaagctacaaaaccagcttggtttctgtatcctcctattccttcttagatgagaatagagccaatgagcagcacttctaggttttgagtgagtttcacagatgtccattcattcagtccaccccctccaggtgacaccccaggaacaagtcaccccaagactatcactcttgatcctacaattgggatggtgtcctgcaacctttatacactgtgatgcctaataggatctatcctccaagttcttcctctttctccaaacacttcaaaacaaatagagatagaaagagccttggaaatctttcagtcaatgctcttcatcttaccaataaaagcatgaagcccagcctggctagataatgagatgcactttacacatctctgctttggatcccactgtcttcagccttttagataccttgtgctattaaggattccccctcttctgtaactgccgtcttgcctcacaactcgctcttctccccttctccctacttccttccagttctcagtctacatctcttctttcagagtccagttctcagaggcacaagttgcacccattcttctcatttgctcacctctcacacaacttcgcaccccagtgtcatctggcatctacccttactacactttaaaagctgctctctccagctaagaactgaattcttctaggtctttatgttcacctttcaaacatcttgcctgatccttcaatagcatttgacacttttcaagtagttcccttttaaaatacccttccctgacttccttgctgtcactctctcttagttttgctgcaaattctgtagtcactccatctcagtatttttggctacctgcccatctctgcccataccttcaatgttaaagtgcctcagggctttatcctgggtctttctctttaactttcacttcataaattcttcctgagcaatttttctgcttctgttactttactggccaatagttcgaaatcattttcttcgagctctatatgagtg

SEQ ID NO: 64151 - DNA, 785 bp, Bovine  19866881434139
  misc_feature (1)..(1): n is a, c, g, or t
ngcataaattatgtagtaatttatttataatctgcttccaagtttgtgttggttttgtaagtcatgaaataattataaacctaaattttatttcatagtgaaagcttggaacaattaaataagtggaatatagagaacctaacagagcgagaggggttgagttttgacttccagatctttttggatacctcaccactaaactggaaaacactgggctttccttcaagccatttgtcaggagtcaaaaaatgcctaagagaagaatttctttcatataactacaataaattttaaagactgctttacatctattgaattcttaaaaattactctgtttctaggtttcatttcctggcaggagagcccagaggagaagtccttgataactctttcactggaggagtgtgtagaactgtcaaaagcagtagagcaagtaatccataccgtgttccggccaatctagaaaatgtcaacttcgaggtacgccagcctatcttgagggcattccaagtgccaatggtgattataagctaaatttcagtgaaaaaagagtcatgaaggaagggacagaataaaaaggtaatgagcattcttcatcgctatcatgtgctgacatttattccttccacagctcagtaatgtcagtgttttcatccttaattcacagatggaaaacaaggaaactaatttgcccaaagttatacatctatcaagaaattgggttcaagatttaagcacaacttttccaaattctggaatccatgctttctcccatgaacaaatag

SEQ ID NO: 64152 - DNA, 1144 bp, Bovine  19866881480988
  misc_feature (1)..(1): n is a, c, g, or t
ngcagcagataattaatttgtaaggctggctagaggattagcaaccacttgagataatagacaaatcatctgaaagagacattcatgtaagtatagctaaaatttttaaagattaaaataaaatttggaagccaaaagaaaagagtttggtattatttataagaataagaaatatatgaaaaataaaaacaaagtaaagctaacagaatttctgaaagaagtaaagagactagagactgggcaatattcaaagaaatcaggactaagaatttttcaatttgattagcaacatgaatcctcatatttaaaaaaaatcatagatcctgaataggaaaacaaaaaataaatctacatgtaagcatattgtgctgtaattgcaaaacaacaaaagtcttaatagcaacaatagaggaaagattaatatgttataaaaaataaaaccaactaccagaattctcagtaaaatcattagtgatcagaaaagagtgaagtagtaccttcaaaatactggtagcaaaataatcatactagaattgtctattcagataagttatttaaatgagagcaaaattaaagacatttttagaaaagcaaaaactctcacaaaacacatctcactaaaggctccaggtagcccaatgttgaggaaagaaccagttcagggacttctgactgtgagaggccctagaacactgagacgtctggctctggagtcctgccctctatttgcacgtagagctgtggagcccccacctgaaagtggctgtggttctgagctgtccagctcactgtcccctggctcacttgctctttcccattcatgcccgattactcaaagaccctcatttaagtgaactactttaaaaaggaaagggatgaaattataaggacaaagatgccagaagtaaatctgaataaacattaaatgcaaaactattaacagtgattattaatttggacagaagattgaaatcaaggtagaaataagattttgaaaataatgacttataaagtgggaagaatattcagttttctaattttattatgtttttcaagagaaggatagaaacattgatgctagactgtagagtaagtatgtttgtttaaatcttaaggataaggaataaaatataagtattaatag

SEQ ID NO: 64153 - DNA, 947 bp, Bovine  19866881529297
  misc_feature (1)..(1): n is a, c, g, or t
natacattttgggccatacagccatccctttataaaatcactctggacaaaggagaggttacaaaaagaggcatatccttggcccagctccttggacaggggggtgagtctgttacaagaggggcaacatagatgctggttagacacctgggtagggccacttcaaaatgcaagtaaaatctacatatcactggaaaattactcactactaaaggaatgttgggcttccctggtggttcagcagttaagaatctgcctgcaatgcaagagatgtgggtttgatccctgggtctggaggatctcctagaaaaggaaattggcaacccactccaggattcttgcctgggaaatcccatgtacagagaaacctggtgggatacagtccgtggggtttcaaaagagtcggacacgactcagcaactaaagagcaacaacagaggaatgttagatacatgcgaataaataataacacatggaaatccgggataatcgatttttgtagacaaataaatgattgactctgacaagcagcaaagtcagaattcacgtaggtagacatttcacttgttctttcatgaaggataacatcttttctttgacaagagcaaaagaaaaaacagtcacttgattacaagtggttaagtgttctaactttattattggctatcacaccaatctctgttgcatcattcccacatttaaaccattcccaaatgagaaaaaggacaatcacactgatcgatatccatttggaatatttattgtagttcttaatgcatttcctaacacctatggtactctttaatcaagaatataaagtcatctacttagaatttgccactcaacatgaggagctttcttagaatcacagaagaagtaagtttacaaatacagcaaccatcaatgtcatacattttccaaaccataactctaacacagatgtaaat

SEQ ID NO: 64154 - DNA, 1188 bp, Bovine  19866881534142
  misc_feature (1)..(1): n is a, c, g, or t
ntttccttgcagataggctgtggccctgtaactttgggtcaaataaaggtaaatagaggggagcatttttctaaccacttcttcctcctttgcattgcagtgcattcaagctggaacttgcaccacaatttttggccataaattagaaggtatggtctctgagctgaaaaaccaaccttctcaacagaggtgttgctgtaactgtccatttgctggttgaaatcccgactcagttgaatggtccaggctacatcactgatcttccataacgattctttgagcaactgttgtaggaggtgaaaatcagatatgaatgtgactgtttaatgtgttttcttgctacttttctgttacaatatattctagaagtataaaatgtatactatatgggattattccttttcccataaaaacttgattactttgaaacttttcttcttattttagaagacatactctgtattgttctgaatttccagtaagaatcagatccacaggaagtggaagttaacttcatgtaagtgccttctgttttccttttaaataaaaattgccaaaaaacttacaatagaaactcatccaatctgaaacttaaattgaagttaacatttttcaaggtttcagtagatttggaaaaactccacttgtcaaagttagtttgctttattatttactaagaaaaagggacatttttggaatagtgagttaaaggccttgaagaaccaattagatatacaagcacaagttgccaacttcaactggagtaatgaaatattcctcatttcatcaattattttgagccagggccacaatcagtcatctgaacccatgtctttcttcattgaaccatacatgaagaggtgtttttgtccttttggaggacaaaatccattgcaatttctaaaatctatgatttctcctgcgttttctctatcttaatcttagacagaacacagtgtcaaaaccattgaaaaagtttgtgaacatgttttcttaataagaattcattcaatggatcttttgaaaagtaaaaattgtacaaccttggcattataagggaagaaagcaaatgtagacagttttggaaaaagaagccaagaagtatactcaagattggaggaaggggaaagtaatgttctcaaggcttcaagaactttccttcctagtaagaacagttattttaaaatg

SEQ ID NO: 64155 - DNA, 932 bp, Bovine  19866881581141
  misc_feature (1)..(1): n is a, c, g, or t
ntccagccatccatctgggcacttgtgagtcatacactgcatagagagtcattcctctgggcttttaaaatgttgatgagccttgatttttgtgttagcccccatatttgttattgtaattcttctatagattctaccagcaagttcatttctttgtgttctctttccacattttttcacctgattcaccaaaagccaatagtattgtccctggaaaaacaaagaacacagacttcactcttcccagatctttctgcttgagtcaaacttgttgatgtttcaccaaaacattcctgagctgcctgactcttagtcacttatctccagacgctgatgctcaataaataagattctcataagtgacacctcatctgaggcttcctccatagtagaagcgcagggaaagtaaactctaagtacattacacttgctgtactttaaggacagtggaagccagctaatcctgaagactgctgctctacccaggatagaagggaagaagctccctgccctccccttccctcatggagagggcttttctctactggttcaatagacagatatgccgtattctacaataatcactttgaagcatacgattgcccaggtcttgcctctgattccatgagaactgggtggtgatgtcaacgtgtgccaaagaggtgactctgactagagcttccccctcccatctgctcttagcttgctcccatcacggacctggtgagaaacatcccctgtgcggtgacaagacggaacaacctcaggagagcttttcgagagtatgcagccaagtttgacccttgccagtgtgcccgatgccctaacagtggccgccccgtgctctcagggaccgaatgtctgtgtgtttgccagagcggcacctatggcgagaactgtgagagacggtccccggattacaaatctagtaa

SEQ ID NO: 64156 - DNA, 1389 bp, Bovine  19866881714394
  misc_feature (1)..(1): n is a, c, g, or t
nctaattttcctggctattttctagcacagatccaccatgtcttccctgaatccacatatagtctttgttaacagattgaacttagattgaaccatgctcttgacgtagtttccctacagtctattcatgacaaagtaattattataaatattttatttggagaaatgggaaatataaattaaacccttccaaaatgaatctcaaagatctgaaagatgtattttcatgaatcactttttgtggtattatggcgttagttattttcataacctgagctaaattttgaacctgagctaaatcataagagcaacagcttttctgtttagtattctagataagcagcagttatttgctgaatttgctcagttttacattggccaaatctcacatacatttccaaagggcagcctgtgcttttagcatctactaatgaaatcacacattacaatctcacctccacatactgctccttcaggataggatgccacagctccagaaacaacttgtaagcttcttttcttttaacagctgaggccacagggaagtaagtgatgagtgggtgggaggacggaatattttaaagccaaaattcaagctatacttgtaatttctgtgggaaaaaagtcaattatgataagaaagtctctagctagtcctatctaattatttttagtactttaaaataagttaattagaaacaggctataatcccagacatacagggcaagagccagaagatttgcacttcatataataaagccaaaattagtgtcttcagttgatatgtgtagtattttcttctgaagtcctcccaggccagataaactgagaaaatttcatatatccaacttttaaaaaattgctgttatattgaaaacattatgaaagaaaacattttgtcaattgaatataagttaaaagctgaaacatcattgcctagagtgatgttagcaagttattagagattatttaacaattttgttagggggagcccacttctagcaggaaagatttggcttatatcgtctcacttaaataagcacttttatttgttggaatcactcttggcagttaatagatcagtcatccaaagctatactgcagacaatgactgcagccatgaaattaaaagacgcttgttccttggaagaaaagctacgacaaacctagacagtgtactaaaaagcagagacattgctttgccgacaaaggtccatatagttaaagttatggtttttccagtagtcatgtactgatgtaagagatggacaacaaaagaggctgagtgccgaagaactaatgcttttgaactgtggtgctggagaagactcttgagagtcccttggactgcaaggagatccaaccagtccatcctaaagaaaaatcaa

SEQ ID NO: 64157 - DNA, 867 bp, Bovine  19866881870223
  misc_feature (1)..(1): n is a, c, g, or t
nccgcttcctctctccttgcagtttactgtctttctatatctttccctgctctttatgtgcaatggaatatgattctgtagcttcttgaaattaatgtcctgtgaagttgttttttgggcaggttttctctgactattcattattcatccctcaggaggacctttagccaagcaaacttacaatgacacaaggatttaacttataaatgtatgagaaaacagatctttcaacatattaatgaaaaatgagtaaaatatagaggtaactatgttgtattttcttgaacttagatgctttcttataatattcgcttagattagctttgtcatatttgtcatttgggtgctggaaaaaaaacaaacatgctgaagcattagattaattgtgcagtttttcaactggagaaagcatttaattgcaattaataatctgcacatagagaccttgtttgacaagagatatttccaagccaatgtttggtttccatgtggatatacagtatttaagtagcaggcactgagagtacatggacttgccttaatttctaaaggagggaacaggtagatgtgaaccctgggtcctccagctagagggagagttcactagaagggattcctttgcaaggagaatagagagaaggtgcctttggctgtcttctgtccattggccctgctctggaacacacttggggagcaggctgtgggccttaataaagaggtggggtgaggactagcgggatgtgattagagtttaccatcagcctaagctcctttgtcttagttacgcattgtgtttccagagcatttgagcacaagggctacaaataaacccccaagtggtaggagatatgtcttggtgcacatttt

SEQ ID NO: 64158 - DNA, 1525 bp, Bovine  19866880355438
  misc_feature (1)..(1): n is a, c, g, or t
ncgctctagtgtgaagtgtagggcccctggattccagtagcctggccataataagctgagagccagagtaaacaagcccgtcctcctcaacaaaactcaactgcgataaccagctgcagcagtgttggaaaagtctctcctgcctcggagctgcgtcagctacaaatgagcccacggctcctggagccagcccccagacaaggccaatgccggcacaactgagggagaagctgcagccctccaaccacccccctcagtccctctccttcagcctctaaaagaagccactgcttccttagtgggtaagtacaggacagccctttgcatatgtgaagtgtttcagtcctgtcaggacaccagaaggtggggaacggcatcctactttacagatgaggaccccgaggctctgagaggttaagtaaatttgcccatttaaaaaaagggaagaaagggacttccctcatggtacagtggttagagtctgcctgccaatgaaggggacacatgtttgatccctgggctgggaagattccacatggcgtggggcaatcaagcctgcacaccccaatgaagagtgggccccgcctgccccagctagagaaagcccatgtgcagcaacgatgacccagcacaggccccccccccccgaaaaaagaggtgcgggggagctcaaggagggagctcctctcaatttcctcaatgactgactctcggagggtccctgaggcaagtacttctcaaacttcaacatgcatatgaatcacctgggagtctactaaattgtgatttctcatatgatggggtcttggatgggcctgagattccatgtgttcaacaagctcccagtgatgtggtccagggatcatgctgggaagaccaggctggccatacagtagcatcacctggggggctctggaagcacactgatgcccaggccccacccccagagattctgacttaattggctggggacatagccaggcatccagactcttaatagctcctccaagcgattcattttaaatgcgcagccaagactgagaaccatctttaaagcgacacttctcaaactttcatcagtagaggaatcccctggagaccttgttaaaatgcaggttctgactcaggtctggtgggccaaggattctgcatttcacaggctcctaggtgaggctgctggtcaacagaccacactttgaggggcaagaccttggtgaaccacccacccccacgctcaccagctctggccacccccgtcagtgcccctgacgtcagcagcctcaggccccaccttgttcaggtggcagtgcaggccattgtggatgatggaatggaagttctctaggcggctcccgtggaaggcgtagatgaggtcgcgttctcctttggtctcgtaaaatttggcattggctgggtcggagtactcgatttcaaacaggaagtccggcacggggacaggcgtgtgaggggtaccagtcagtcttttggatcttttcaaacttaaaacatgcaggaagtcggagtt

SEQ ID NO: 64159 - DNA, 3384 bp, Bovine  19866880445772
  misc_feature (1)..(1): n is a, c, g, or t
naactgcacctagctaacatttgaatggcattgctctgctcaaattcacagcaacccacatttctttatagctcaggggcatggtgccaaaggagacaatgtttatgaatttcacctggagttcttagaccttgtgaagccagaggtatgttctttccttccttccctttctattttaagaaataaatacttatagttttgtgaaatggggggcaagccttatggggaagaagaagataaacctaagcagaatatacttttgtttggaacagagcccaggtgttagccacagagtaagaggaaaattggagaacctgagttgaatctgggctttgtcattattagtggtgtgaagaagtctcctcacttctttgcatttcagttttctcatatgttacatggaggattgggttaagtggatctctaaggttctttccagctgtgagtttcttaatagtcagcagtggtttaagggtttcttaatagtcagcagtctgggacttcatttggaggaaaagagagaggccatacaaagaaataatgagctggagcacccctaagaatttgagtttagttgagaaggctctgtagtgaaagactgcttttaaaaaagctgtaactgatacagtacagttctggccttgatgcaggcctttctaaatgctggaaaccactgaccatttgaattgaatcatcttcatgggaagatttggaaggcagtagtgcccttgagaaggcggttggatgtagagcctggcatgatgtagatccagtagggagttcatgctaatttctaattagtagggagttcatgctaattaccaagataatcaagactatctgcctttcttgtctggctttcctcctgtgtccccagtggggcagcgggtggggagggaaccggagcaagatattgctgttcttggcgttcttccttgtgccagcccttggtctagatgttctctttgccccaggacttttaggaactgagaaggaacagcagtaagtaccatgcagcttctttgatgggaaagggcattctcatgttcttgctttctctcctagccggtttacaagctgacccagaggcaggtaaacatcaccgtgcagaagaaggagagtcaatggtgggagagactcaccaagcaggagaagcgcccactgttcttggcccctgactttgatcgttggctggacgagtctgatgctgaaatggagctcagagccaaggtcagtaaggatctgggatctagacagaagtcatgaggaacccaagttatttgggccacctcagatatctatcaggatctgatagaataaggacaaaaatataaattcactgaatgacctggagacgtggttttatagaagtattgggcatgtattttgtagactgttcctcagttgggttttgtttgatgtttttctcatgattagcttagggtgatgggttttgggtaggaaggccacagaggtaaagtgccattcttatcatgtcatatcaagcttttaatactctcaacatgacctacagctcttgatgttaatctagctcacctggatgtggttaatctttggtaggtttctccactgtatggtttctctactataatgttactcttctccttcctttactgttttctttggaaggaagtcactatgcacagttcacacttaacaagccagaagttatgcttcccattcttagggtggagtatctgtatactttatttggaattctgcatgggagatttttcttttctcctttatttattgtcatttatttatatcagtatggatattgtcatttatttatatcagaacagatttggtttatagttgggctgtaatccaatactgggtaatatatcttgttgctcatattgttctatctttggccactggaagctcttgtggttggctcttgtgtccctttgacacagctcccatcatcatgggcctttttttttttaaagtgcatccttaatttctggcactgtaagctgctccaggtttatcttgtatattcccaggcctgttgtttttattgcaggatgatagtggaaaccaggatctgggtgatctgggtgctaagtgtgctcattgctactgaggtattacttttaggttctctcagctgacagcacaaggaaatatatgtgtgtataccagcccatgtatatacatgtacctctaagtattttccatatatatccatctatatctatattatcctaatataagttcacactaatgttggagatttgattttagcttctagaaaattatcgaagtcttaaaaaatgaaatagcaatctatttcctgtcttaaatttctgttttgtttctacaaccatgacagattttctagatgtcttttccagctctaagatcttaaggctgcccactttgtagtttggaagccagctgattggtttaattctgtgagccctggatgggtcattctgtagtgccagtgctacccagtaaggagtcaggctccttagtaccgtgagttcagacatttttcccaaggaagtgagaacacaattggaggaggaggtggctttgaaggactcagatcatttatctctcatgtgggcttctgcaagcatctgggaattttaacttgtgttttttttgttttttcaatttatttttttactgaagtataattaaaatacaatgttaaatacattattgttgtacagcagagtgcctaatttatacacatatatacacatcctttttcatattcttttcccttatggtttatcacaggatattgaatatagttccctgtaccatacagtagtctaacttgtgttcttggaaaacttctgtccaaattctaggaagaagaacaattaaataaactcagactcgaaagccaaggctcccctgaaagtaagttgcccctactgctatggtgggtaccagttaacttgtgacagagatgggagtgtggatgagtgtgaagcagcaggagggcttgtattgggtggatgagtttctgagaaatccttaatgcccaatgcttaagctgtgcaaacccgcatctaaagtgttacttacttttaatgtttccctgctgttgggggcctgacatcatctgagtacaccaaggttggtgtagcagaatggaagaacctcagcctcctggactggcctagtagggtgctaggtggcagcaagtccttcagagacctggaaagtactgcataggtccatgactacagttcttccagtctggtggtgttttcctaaccgagatcataagggctgttgttgtcagccttaaagatggaaagtattctgtacagtcctgctgttcattaaccttttaaaaattcagttctacttctatgtctgtccaagtgtgtc

SEQ ID NO: 64160 - DNA, 1694 bp, Bovine  19866880482635
  misc_feature (1)..(1): n is a, c, g, or t
nttctcctcccgccttcatctttccagcatcagggtcttttctaatgagtcagatcttcgcatcaggtggccagaggattggagtttcagcttcagcatcagtccttccaataaatattcaggactgatttcctttaggattgactggtttgatctccttgctgtccaggggactcgctccaaagtaaccatgaggaaatctcccttttgcccttcacatgcttccacctacctgttagagcagaacgcaggtgctgctgctgaggtgtcacctgtgtgacgagtgatggacatgccaaggcctactctcacaccaggcaggtcatctgtaagtatgccagggtgcagaagtaggtggaaatcagtactccacagcctgacctcttctgatgctcttgagaagctgtgaggcgtggtgcaaaggcccttgcctggacaccggtgtcctgcataactgggcaagtcagtcaccctctctggacttcgtttttctgattgtaatattgagtcgttggaccaacgttcatctctgcgctgcgatattaaggcttcctttccatccagttagtccttgggactgcctgcctttctgagccttttcccagtctattcttgcccctactcgtcccttacccaatccctccccaaagaccacttaattcacagtaatttcttcctcgccctcctaaggcggggagtacttgtggtctgtggcattcaggctcagccttcctctcaatgggggctgccctgcattgttaagtaactgttttgtggctggatattccatctgtttccttaactcgattttaagctcctaaatggcttctctctcttttgtatctctcacgtcctctgcctgtggagcccaataaaaactaaatgaatatgtggccttgtaggtgcaaagctccatcgctctctccttctctttgactttctctgtttctccccacctcgtaattgagagcatagctcaaagggacagaagctggtgaatggggaatttaacacactagaggcaaaatcttggggaggctgtggctgcgtgtttttctctagaggagctgagactctcttcttcggcagatggcgtgtgaatcagaaaccgcattgcttggtagccctcatgcctgggtcttggggtctcctgccttggactgtattccctggctggataaaggctgtatccccaggcctgctggcctcaactgtagtgggaggaccgcccctcgccccagcagcaggacttgagtgtggaagttgcaagcttctggttcccacaccttggctccgctgccacaggcagccagctggccccttgaacacaatgtgcagatcttctctgttcccgttcccggcattgtccatggccgggcgccttggctgggaatgcgggccggtgaatagcggaggcatttgcagcctgcaatgaaaacaggccccccagcccccgctagccccccattccctccccaacccccgggagaaaggactttttcacttctggccttcttgtattgccttcccctcgcctctccaaagtccctgcaggcatgtgtgtgtgtgcgtgtgtgtgtgtatgtaagagacttttcacagcagcttgaaggctgttcaacacagccctcaaaaaaacaagtagaatggaacagaagggcacccaggatggaaaaccaaacagctcactgctg

SEQ ID NO: 64161 - DNA, 1932 bp, Bovine  19866880558791
  misc_feature (1)..(1): n is a, c, g, or t
nttcttatcctacccatatttttcagttttgaaattttttgttctaccttctgtaagatatcttcaattttatcttgcaaccaatatttaaaaaaattttccattatcatatttattatttctaagatttcctgttcttttttcattaatgtctactaagccagtttccacatagaggctccaagcaattagagacaatataaggtaggctgtaataagatgccgaaatgttgggtactaacactgagtgctgtaggataaacgggactagacaaatcgtctaccagaaaacactgggacaactccatggagaatgtaggataggatccggacctggaatttaagtacatttgggtaggtgaggaatagcagtgttgaatgggggaagaagtattgcctttgaaaccaggcccagctgtccctgtgaaatctgagcctcaattttctcatgtttaatgagactaataatatctaccctcttgagttgctaaaaggagataagttgtatatgttaagtattttgcacacagttgtaatttaataaatacccttcataaatactcatattcttcattgaggccagaaaaaaatatcttctctagccatacttcctagcatggtgcttcctacatagtgaggtcttaatatagacgacgaatgagtacgtgagggagggaataaataaatgaggaaaagagagcattgcagacaggggaagaacggaaacagtggccaaaaagttggaaataagcatgttgcctgggaaatgacagttgggatcttggcctgacttagaaaggcttatggagtgacaagtcttcatggaaacatctggaaagctgaaccaataaatttttggagggggtaggaggagaggggcagtgacagaggtagaatggggccagtacaaggcacccaaattaatgaccagattggggttagagcacctctgggtcagttagagaagctgagctaattccagttttcaacagaaacgtgggcaagggatttaagctccccagtcttgttgggaaaatgattcctgctctgtctaccctgaaagatgacacggataaaatgagccaagaggtaataagtatgctttgtaagtttgtgacaaaatatcattgactcaggaagcaggtggaaaaatagaaatctttgtttatccacgtggctataaactcaacatggctttatgtctgtggaagcagtaaaccagtaacccgtaagatgggtatgtttcaccaagaaggtatttcttccctgctcttttccttaaattggctatatgtaatttcacttttaaattttctcaatgtctctacctatgctgtctgatccagtagccactcaccacaggaggctattcaaatttaattaaataaaatccagttcctctgctacactagccaggtgtcaagggttcagtggtctcatggggtgtggctacctttccttatcacagaaagttctgttggagagtgctgggctagactatgtagaattgcagtatgtaggtatacatatatttttatatacactttagtattattttatgtatttttatcctcttatgaccttaatttataaagcagataagtaaaacttgtatatttaaagacagtaagctgtttttcacttgcctgggcctcagttgattgttcagtgtccaacgttagtgctgagaacaggttccccaacctgacggaagttaatggattttcttaattagggaggtaataggatataggagatcgaatgattcaaagagcttctaacctaattggaaatgtgcttgactgtgttttgccagatgtcatttcaagcttgtttttttcttttaagatgctaaagaaaacccttatggtgaggatgataataagagcccgttccccctgcagcccaaaaacaagcgcagttatgcccaga

SEQ ID NO: 64162 - DNA, 875 bp, Bovine  19866880664764
  misc_feature (1)..(1): n is a, c, g, or t
ncttaatatatattattgcctagccttgaattaaaaattaggttctctttctgtttcaaatttgtatatttcagtttgtgtaaatcctaccttaaaagaaaggaaaaagagtattgaattctaattaatgaattttttaggggtgaagtgtactgatgtcttcaacttacattgaaatacataaaaaatgagatgggaatgggtatgtgataaagtaagtgtaataaacagttaaagtttaaatttaggtgttcactgtacaatgatttaatttgtatatttgaaaattttcataatgaagcatgagagaaaattaaattgtaaaacccactgggggaaaactgaatgtctctagtgcattgttaatatgtgttctaggttgtgcttcttgaggaactgcaggaagcacagggctgtgggatatgaaaaacagacagctagggactgttctaccccaagaacttctgcttataaacagagacaaagattctaattggcctcttttcttttccagggttatacgtaaatttccgttatctttataaacagcgcaggcggcgctttggacaaaaaaagaaaaagatccactaaacggaagagatttagatgactttttgccagtttgagcctaatctatagttcttacagttttaccttcttgtactgatgtaaaagtttttttaaagttaaatgattcaattctcagtggagctatcttctttttttcccagtaacattcctgaatttactgtattaccttagtgtagtcctcgcatgacatggggttcctgatacccgatgacaggttcattccttgtgtattctggttagtgacagcaaaagactcagccatacccccacccactccatctcta

SEQ ID NO: 64163 - DNA, 1809 bp, Bovine  19866880681846
  misc_feature (1)..(1): n is a, c, g, or t
ncattgtaattcccacaaactatcttatatgctattggtatcttttaaaagaagacaccaaatcgacaccagtatactcagaaagcagcacaattatgcgttaaggaaagcatcttcctagtaaattgacttattgaaagctggtatttgtataaaatatagagggctcgcagtggaattttagaacactctctggaagggatgattataattctgagtgatagaattgtaaacatctgtacaatatagtctgtctgcattattccagtgtagcatttattcagcacacttttaaccttctcaactattgactcgtctaaaaagtgaggtgtatcaatgttataaaatcggttgccctttcccgtgagtccacattaggtctacgttagcatcaaatcagagcagagttgtagcaattgaacatttgccataaagaggtactttgagaagtggtgtattttaaaggagaaaacagtaaagttgccacaaggaaaatcataatagtctacaacaggagtcaggaaactttctgtattttagcctttgcaggtctgtggcagctcctcagctctgttgtagcatagaaacagccatatatattaagtaaataaatgaatgtggtttctgttccagtaaactttgcttatagaaatagtcagtggcccatagtatatgattttttctatagggtcaaatacagaattcctcagtagtgtcagcagcatcagtgatatttgttttttaaataaatataagattgtagctgcctatagtgtaaaatctaccccaatctacaattggaaagattaggggttgacctaagtaaagcatgaaggaatatgagaagtgatggaaccggtctgtatcttgatcgtaaaagtggttacatcgctgaatgcacttgttggaactcgtagaactatatacaaataagggtgaattttactgcatgtaaattgtatctcagtaaacccagcttttttttttttttaagcttttttctcttttcttgctgtaaaaccatcctgttgatagagtatgatgtcatgagttggtgaagaccctgacctactacaataaggttaaaatcagagcactttagtggacacttgctaaaaaagccaataaatacgttttatttcttttcagaaataaaaatctttggcaccttacttcataattatttggtacattacagactatctaacttcctaactataatgaaaagtaacgttttgttgttaataccctccgaactgaaagctagcggataacacagtttcatttgctacttcttcagtgtttgaagaaactcagaaagtatgtaagagccagaccttatgcaccatgcagacttctgccttttaatgttttcttcttcctttgcaaaaaggaggaatctgaatttgagatatactgtaccctgagggcaaggagctgggcctggatccacttagacttgcttggtgagttttggggtgaaccaggtccaaaccacagtggaagttattagtgattgttttttataatcagttactatcaaatggatttgttttaatatggaatatttttagccaaatttttagaaagctggactatgtcttcgttagacatagtccattagagtaaagtctgtttcatttggacattacaaaaaatatttcattatcacacagcatctgaaaaagctagtggcggaagtaaataattaggtagcagctgttggtacttgaaagagggatatgcgttgcctgccttcccaagagatgacatctctccagggaacctctattaagcatgtttgggctt

SEQ ID NO: 64164 - DNA, 673 bp, Bovine  19866880705845
  misc_feature (1)..(1): n is a, c, g, or t
ntattcctgcaactttgttgagactgagtatctggtgtggcttgtgggcccagatgcaatacttgagccagtgagaagatgagtgtgtggttgtttgttgctgaggctggaatttcaggtgcgtccaccagtgagagtcccagagtgtgtctgcgatgacgaaagtgagaccggctgggtggtggactgtgtccgtgatgctgagtgtccttgggccagtggtgctgtgctggtggttgaccgtgccccccaccacaggtacacgctgctgcccaagggagtcctgcaaatcacaggccttcgagctgaggacagcggtgtcttccactgtgtggcctcaaacatcgccagtgtccgggtcagccacggggccaggctcaccgtgacaggtgcgggcctctgccctgttgcattcttcccccaccaccacatcaccctcccttcagtggaaccccagggcctggactgccgagtgtgtaccgagcaccttctgagcgcctagctctgtgctcctcctcccgaggagggtgcagggaccccgaggagggcataggaccctgaggagggcacagggaccctgaggagggcgcagggacctcgaggagggcgcagggactccgaggagggtttagggaccctgaggtccctcgctagctcagttctctcggaggaa

SEQ ID NO: 64165 - DNA, 2846 bp, Bovine  19866880782141
  misc_feature (1)..(1): n is a, c, g, or t
naatgatataagcacaagtgagaagctgtaaatcacataaccaaaatatgttgctgaagacttggttttgtggagggccttctatgagaagtagctaccactgaaaggtgatggtgagtatgaaagcagcaatgaaacactgaataaaaacagtaggtcaaaaactggatattgatcactcttggtttgtaaccagtgatcccatataaaaatggcttttagttttattgttttcattttaatatatattcctggtcacagtgaaggaaatattaactaccacttggaactagaaaagtcatttaatcttgcaacagatctcatatacaagatttggttctactaaataaatacatatacattctttccattagggcttccctcatagctcagttggtaaagaatctgcctgcaatgcaggagaccctggattgattcctgggtggggaagatcccttggagaagggataggctaccctacccactccagtattcttgggcttcccttgtggctcagctgctaaagaatctgcctgcaatgcgggagacctgggtatgatccctgggtggggaagatcccctggagaagggaaaggctacccactccagtattctggcctggagaattccatggaccatacagtccatggggttgcaaagagtcggacacgactgagtgactttcacttcactttatttgtataatgggattttataaaaggtaatactgattaatgttggagacattgccttctataataattttttacagcaaatgcataaaatttttaccctgatagctcagttagtaaagaatttgcctgcaatgcaggagacgctggttcaattcctgggtcgggaagatccattggagaagggataggctacccactccattattcttgggcttcccttgtgggctcagatggtaaagaatccacctgcagtatagaagagctgggtttgatccctgggttgggaatatcccctggagaagggaaaggccacccactccagtattctggcctggagaattccatgaactgtccatggggtcacaaagagttggacacaactgagtgactttcactttcacttcacttttcatttaatttaaattttttaattttttggctaaggtcaaaaacagtgttaaagtccaaattagtgaattgtgtgagggaataaactaatattattcaagcgtgatgttttctttgtgttcccaagtactttatgtaacaatgtttagaaaatttaaggaattggatgcctggcctattattaaaaacttatgactttaccataaaggagaatggggaaactttcacttatactttgatgacagatagatttgaggtcattttctgttttgaaagccttaaaaaacttttttaactttggtcaaaatacaagtttgctttttctaaagatgcttggttttagagacatacatacatacacctatctatgttatctgtccatctatctattaaaataccttggcacattctgcaaaatgccattctgtggtttatgtcaataaacacagaggttaatctgtgttttctttacattattaatttttagtgtggagaacagttgttctttaactttatatgaggctgtacaattcaaacttgcagtacagttgtaatatttgctacatttaaggatcagtttgattcctgacaatattacctttaatatttgagggtgttttgtaattgtgtactaatttattttttagggttttatatgactggaaagaaagattgaaacaagggtgtgaaattatccagagtactccctatggacgccctgcaaatattagcaggcagtacctcatcacaaagaatttatatcacttaccgaagagcctctgaaaacatgactcagaatacgttggctgttacagacatatgtattattatacccagtaaaggagaaagtccaccacacacattctgcaaagttgacaagaatctcaataacagtatggtaagtgactcttctgcatggataaaattagccacccatgaaaagagcataatttaaaataaatctttggaaaacagcatggcacaattactgaattaaaaaaatagatttcttaaagatgtcatatattttatttttaggaaagtaatttagctgtactttcaaaaagaactgtgcaaaaagctttctttctttttttttaattaaaaaaataattttttccccttactgcaaaagtagcgcgctagctgagggtaaccgctccacttgtgcactagatcccataaactcacctatttgaaatgaggccatggcttcaacaatcctccctacttttttgtgactcatcagtttttcactctactggatcatttacttcagcctgcaaaagcatgctacaatacctcccatctttacagagcttcttgatctttgtatcccactccatgtattcccccatttgattgtctttataataaaaggtcttagaagagatgactatattccatctccttcctcactctgactctttgcagtaaggcttttgtctccatcattccaccaagatttctcttgttgaatccagtgattcaatgcttaatcttaatgtttcagtacatttagacatagatgatcacttcttccttcttgaaacagtggcaagaaaagaagatgtaatcgtgtccaactctttgtgaccctgtgaactgtagcccacctggctcctctgtccatggaattctccaggcaagaatactggagtgggttgccattcctttttccaggggatcttcccgaccaaggggtctaacttgggtctcccgcattgcaggcgggattcttta

SEQ ID NO: 64166 - DNA, 636 bp, Bovine  19866880792223
  misc_feature (1)..(1): n is a, c, g, or t
ntgaatctctatgtacaggtaggcccttggatggaacccagagtctatcgtttgaaacataaagctttttggtggtggagagagagaactataaaattctctgtaggaatgaagcactaacttgataaaggtggtctccatgagtaatttatagaattcaagcatagtagagacacctgggtgcctgtctgcccactctcccttctctatgaaccacaggcctgaactcacacactgaggagccatttggtaccatggaaccttggctcccagattcaaggaattcagtcaggacaccagacttaaatggagtcagtctgagtcccatgaagtgacttcttggtcgaattttaatgcattaaaacgtacacacaatctaacacacaccacctcttcaaacacctgcctaaactgatattagaacagtgtgagaaacagctgctttgcagtttggcaaatagtgtcatgacttaaaaaaccaatcatgttctttgatcctgtctgattcccagagacagtcattatgatattagaacagcagaggatgggaaggacctgattcatagcagcagaggagaagggtaaacacctgcttgagaagcagcgtgctgcaatttaaaatgttagtaagaaaat

SEQ ID NO: 64167 - DNA, 1424 bp, Bovine  19866880838964
  misc_feature (1)..(1): n is a, c, g, or t
ncgatcattctctggaaacagaccctgccagtggtcacttgatcttagtcaaattaagggaaatgtacagtgaggaagtcagagggctcagatgccaatcacgacaagcaaaacctcaggaaagatgtaagagtctgggccatctgcacttaccgtgtgtcaccccctcggctggctgctgtcttccattattcaaactttcaggcaaatttttcaaaactgaaataagctttaaaaaaaagagagagaaatatattcaagatgaaaagaacaaaaacagaaatacattacaactcagtaccatgaaattggggtcaggcaataaatcggcttaagccgtgacgagccatctacttggtgaggtctcagtggagctcttgcttctctgcaggctacaggccaccgatttcctttctgagaatgctgagccctgaccggccattagaacagcctgagctcagctaaccacactcccactctatatgaaggaaagctgtggagatttaaacagagtgtactctggagtcacagagttctggatcaaatcccagttccactgcctactagctgtgtctctgtggaaaaactgtttcacgtgtctgtgaccttcaaggtcatcatctataaaacagttgaaaaaggtttgttggaaaggtaaaaaaaaaaggacataagagcatctataatagtatacaacaacagtatctaatacagtccttggcacacaagccagtgctccataaatgacagacactaccataacagcatttccgaggggactgcctagaatggagagcaccatctataaaccaggggagaacgtttttctctacagaaagtttagttcagatgaaaatcactaattgggtcattaagcagttactcagacagattgaatgaaaaagtcccagagttcatttacagcaagggggtcagcagaattccaaaacacatggatgcagacgactggaacataggtacaaaagtgggaggaaagctgtgactcacttaggaaatgctcctggtccagtttgacagggatgaatggtatgtccctgagactaagagtgaaactggaagaatagtctaaaagcctctccatggaatgcggtagatcatataaaatcacatatttcattcaaaagccttgattaagtacctcctttgtgtaaatgttcaaagacttctaagctgatttttaggaagccagggataaaaatcattttttttaaatgagtctaaaattatatatcataaaagtgttcttttcatcataaacactttggaaacaagcagggggatattgtgtaccatgttggcacccagtcttgacagcactgcttccaattcctttgaggtgctcttgggtggcacagggaaccgtctcctgtttgaggattggacctacatcaaacctaccaaga

SEQ ID NO: 64168 - DNA, 1399 bp, Bovine  19866880913520
  misc_feature (1)..(1): n is a, c, g, or t
ntattatgatccactgagtgctttaaaaaaaaaaagcctcagacttcctggcagtccaactctgtgtttccactgcaggggacatgggtctgatccctggtcagggaactaagatcccgcatggcgtgaggccaaaacataaaattttttaaaaataaataggcttgtctgaaagtagtgcattatctcaattgattgttcacagttatagatcgaactcctcatcctactctttcccccgtctcactactgcacttgactagtcttttatgaaagcagcctagatgtccatcggcagatgaacggataaggaagttgtggtgcatatgcacaatggactattactcagctataaaaaaggaacacatttgagtcagttctaatgaggtggataaacctggagcctattatacagagtgaagtaagtcagaaagagaaaaacaaatattgtatattaacgtatatatatggaatttagaaagacagtactgatgatcctacatgcagggtagtaaaggacacacagatgtaaagaactgacttttagactcggggggagcaggtgagggtggggtgatttgagagaacagcattgagacatgtacattaccatacgtaaaacaggtgaccagtgcaagttcaatatatgaaggagggtatccaaagtcagtgctctggtacaacccagagggacagggtagggagggaagaaggcgcggggttcaggatagggggatacatgtatacctgtggccaattcatgctgaagtatggcaaaaaccatcacaatattgtaaagtaatgatcctccaattacaataaattaattaattaaaaaaacttttaattcaaaaagtatctttaatgttttaatttaaaaaaaaacactgtctcaactttgcagagcacatagatgcaggcagaactccacacatgaaactttaatctcaaataaaatgagactctggataagacagtcttatccatagtagaaggagcactcaaacaccatcctggcatttgtacccacctgaaaatttcaactgtgctccatatataaaacacaaagaaaaccacagctttgttttgcatctcttccatggtaccaaagatgataaacaaaatgaagtttcttccaagaagctattaaaaagacccaaaagagaaaaacaagttttaaaatacattcttaaaagacaacacataaatgtgttatctgaaacataaccccattaaattcaaggtaaatagaaaaagactgagaacaacttagaacaagtttaagtaccaagtcagtaccagtattacagactgtgtgtgtgtgtgtgtgtgttcagataaaacactgctatttctctgcaacaggtagaaaagttaaaagtacccaagccagtaccag

SEQ ID NO: 64169 - DNA, 887 bp, Bovine  19866880920583
  misc_feature (1)..(1): n is a, c, g, or t
ncccgtgtggcgcctcccctggcttggacgggggcccactgaggcctgtgcggctctttcctgctcagctttcatccatgctgacccgagggagcagctcggcctctctgcacaacagcaccatccgcagcaccatctaccagctcatgctccacagcctggaccctctgggggaaggtaagcaaggcctgcccagacctgcgtggtctccctgtccactccttcccttctgagctgggcagaaccggggcttgtgaagcgcagaggcagtggagcgagggcgggagtcggaggatggcaagggcagccagtcggggaagcctcacccagaggaccctgtggagctgcccttacttatgcacacccctccctccctgtctctttgtccctcctgtgaaacgaaaggggttatctgcagtgagtggggccctgagggtcgcgtgccctgcgctggtttttgtgggggctgccctcagtgactttctgcaaagcccactcccatgagtcagccccgatgtcccacagagtctccagccggatagtgtggccaaggttgcttctgggggcacctcctgtggggccccatggcttggaagttctggctggtaccttcctttgctctgtattcagctctggagtcccaggaagctggctgacccctcccccagccaggaatcccaaaggacacctcgagagccagcaggaccacttctgggagtctgagggtccaaagtgcagtggaggctaaagtccaacttgacaaatgatagaaacagctgagagtctcaccatcctccttccacatctcgcctattgccccgcttcctcagagcgccgtctcggacaggctttgcaggccccgaggggcgctctcaggtacactccta

SEQ ID NO: 64170 - DNA, 1969 bp, Bovine  19866880921376
  misc_feature (1)..(1): n is a, c, g, or t
naactcaagtgatggctgcctgagtgctgaattgagaattttgctccaagcttggctgcagagcaccatgattcactggtgatgtctgaaatgggcagggaatggggaaataatgacagggaggtgttagggaggtgttcctgcaacccttggactagactgtaaggtctgcagtttaccgtctatgaatttactagaagctttgctctggctccagaggcactactggtggccatgttcataagcctcccctctccagtgggaaagggaaatgacggatcatcaagctcctgtcacactcctttcgacctcagacacctggaacccaagcagagcctccttccagacccctgtgcacgcctcctgctctgctggtggtcctcagagcatcatgcacagaatagcactgtcctgattgccagaaaagaaaaatggggacggcagctctctttcgatatgactatgttccaggcaacatgcaaagtgctatagtttcagctgagaggcacaagactgagctgcaggggctcaggagggccctcctcacagctgtgcaggccgtggggtgaggacgagggcacgggcggcagaacaaagccgtgggtctatctggggtccaggctggctccgcccgtgagtgccgggtggcctggggaagcctgtgcaccctcgctacacctcagcgtcccccctctaaagaagcaacaatatgatacacttggaacactgatatgggggtctaagggacaaaataaacaaaagtactttaactgctgcattaaatattgctatgttagcttcgattttggagccagatgcctgggtttgaatcctagttctgccaagtgctagctgtggatccagcagggtgatcctctgtacctcagattcctcacctataaaatcttaacagagttgttgaaggaatccatgaatttatatacgaacatgcttaaatcagcgcctggcagctacaagatactacgtaagtgttagctatgacaaccatgatgagctgacaacactcgctgagagcagctgttccacccaggaagcaattctgcacctttgaggcccagcattccagagggtctgagttagaatggaccccaaagatcctctagtccagaacaccggcacactgtgaagatttgggaatcaaactctgcctgggtccagaatgggtccagaagcagaaacaggtccagagtttccttctctcaacctgtctcctgaacaatcagggtggttcagctgcagctgcctctggcaactggctccaccccacacagccatcactctggcacgtgtgatcccttgaagcatcctgtccttggtgggcctgctcagcaggtcccatcagaactgagatgtcagaaagtgagtactccactgcctccctcatgcagacagctccagtgccccacggacactgatcaagcactgcagtcttctgctgaacaacacataacttttccaagggctcccctggccccagtcctggtgccaagaatacctgtagactgttgcctggaggggctggcaagaaaatcaagtttccctctttattcttcttcttcattacacgccctaacctctcatttcccatgccctaaggaacgcaggtcagcttcagggcctttctctgtttcttcatctctttcatatacatacgcacacatccatgtgaaatcaccagaagaagcatgaggtactagagaggtggagcccctgcccagggtaagagttcagaccacggatcagctctgtggaaagagctggaatacttggaaagggtagaaacatctggacagtcatctgaatatagcatacggaaacacaaacatgtgtctggaaagtgctgggaacaaaggtcttcatcccagcccttcctgggtggaatctcggggtgcaggataagggctggcttctctgagcaggactgcacgccagcaacatcagcaagcct

SEQ ID NO: 64171 - DNA, 1156 bp, Bovine  19866880938671
  misc_feature (1)..(1): n is a, c, g, or t
nggtctgtgccccgtggctgtttctgagcctggggctaggggctgggtgatagggattgtaataattgatctacatggagccccagcaatgatattagtagtataggtctccactatactctcaaaatgacttcacccttgcacacagcttcaataatctatgtgccagtactcacacatgaaattctccaattaggcccttctaagatcaaactttggaaaaggcaatggcaccccactccagtactcttgcctggaaaatcccatggacggaggagcctggtaggctgcagtccatggagtcgctaagagtcggacatgactgagcgacttcactttcacttttcactttcatgcattggaggaggaaatggcaccccactccagtgttcttgcctggagaatcccagggacagcggggcctggtgggctgccgtctatggggtcacacagagttggacacgactgaatcgacttagcagcagcagcagcaagatcaaacttataaatgcaactgcctacaaggcctctcctccataatgtctcaagggtgcctcaaactcaacataaccaaggtaaactctgacgttcccctcccccaaactgctcctcttcctccaggattccttatctcaaggaatgtctaagatacacacaaaagcttgggactcatccccaacactttcttccccttcactgccacccatctcaaattcccaccagattttctctcctaaatctctggaatctagccatttcatgctacctccactgctgccattggaatccgagcccccttcgtctctcacttggacaactggtgtccatgtatcttctcatgccttatcattctgttacatacaactgggatgaaattgatcatttcaagccattctgatgtttaaaagcctccaatagttcccccctactctcagaataaaatcagactcctgacaaggaattccttgtcaggtgtctggcccctactccctcacttgccgtctgcattgccctctcagccccacaaagggtctttacatacactattccagatacctgcagtgttcctctttgtctcttcccaccagttaattcttcagagctctactggaacatcatgtccccaaaaagctttccctaacccccaaacttgaat

SEQ ID NO: 64172 - DNA, 1506 bp, Bovine  19866880941385
  misc_feature (1)..(1): n is a, c, g, or t
nacccctgctggagatgttaccaaatacacagtatatactgtgggtaaagggttaacaacgccttttcccttcagcatgagttaatttcctatccacctgttcccctggagatcagataaaagaaatatagcaattacatacataactaagcaacactgcttatggtaactacaacccaaatggtaactgcagctggactggaagaaactgtgagtggggaatccatggttggggtttccctgagtgtggtgacgttttgtgaggaccctggtagttatgtttatgatattgttactagaggggccagcctccgtggagcatggggcttcattagaccagagcagttcctgcagtcactccatgtgaatctcatctccttaacacctgagttgtcacacttgagggcaaagaccagctcctggacctctgtgtggaccacaacaaggacttctgcagaaatggaatgcctgttgtgagttgtgatccatcccagagccttctgatataagctagtacctggtgtgtgaggtggacaatattgcctctgtaaaatcaggcagaatctgaatttcacaacagattcggtgccaggatttctgataagcgactggggaacctagactagcagagaggtatctgtagcttttgctcagaaattagaactgactagaagccaaatctctccagaatgggatttaaaacaccactgcagactggtgccacctgtgaacatactccctccaagctttgctcactcagtcccctggaatgccccttccctcaactctaccaacccaggcaacccctctcctccaaacccctaaagcactcagccccagtactgtctatccaaattagccaggactccccaagaccaaggactgtcctgtgttttccaagttctgtttccctggatgtagaggaaagaaaagatggatctcaggttgaatccctactccttagacctggctccgccactagacctggctgagcctcgatctcctctctaacatgcgaaccccactatctatctccacgtgggttgtcaggaagatcaaagaaggtaacagaatctcagcgcctggtctatacagtgtatgtccatttcttttcttctaatttgtatttctccctggacaacacatacctttcctagggatgtagttggtacttcatgaatcccagcagttctttcctctgtttctagctcgttcacagttgcaaaccttgggggggtttattccctaaccctgtaacatttcagagttgttttattcccatctctgtttctaaagatgcaatcaacagactcaggtttctgataaaactaaatctgtatgctttgtgggccatcagtgcggatccaatttaaaaacaggggatgtgtagatgctccacaagaattgatgctacacagtagggaagcagaaagagaaataatcatgacttacaactattcactgtcataacaaagaaggggtacaaactacaaaggggaacaagag

SEQ ID NO: 64173 - DNA, 1814 bp, Bovine  19866880980277
  misc_feature (1)..(1): n is a, c, g, or t
ngcaaacctgtcaggcctcgagctctggaatcagagaaataggcttctcagactcagctttgctccttactagtggcaccccactccagtactcttgcctggaaaatccaatggacggaggagcctggtaggctgcagtccatggggtcgctaagagtcggacacgactgagcgacttcactttcacttttcactttcctgcattggagaaggaaatggcaacccactccagtgttcttgcctggagaatcccagggacggggaagtctggtgggctgccgtctatggggtcgcacagagtcggacacgactgaagcgacttagcagcagtagcagcagcagcttgtgccctgggaaagtcagtgaacttttctcatctgtaaaatgggggaaatttttctgagataatattcaatcattataaaaaggctttgtgaactatcaactatccaacaataagactctaatgggtactgagctcctattaagttccaggcactacactaggtatttagccctcacggcaacgtaaaaaagtaagtatatattatgggcttccctggtggctcaaagaatctgcctgcaacgcaggggacataagttcgatccccgggtcaggaagatcccctggagaagggaatgactacccactccagtattcttgcctggagaattgcatggacagaggagcctggcaggctacagcccatagggttgcaaggagtcagacacaatgagcaattaacacacacacacaagtatatatcatcttctatttatagcttggaaaagaggctcagagaggttgagtaacctgcccaaggtcacagagttcagcaggagagaagccaagtccaggacctgagcctgctgcctcatagctttgctcacgccacgttcaggaattattgtggctgctacagtcacagccgacacagtcacagctcggcagctgaggacacacgcttgtcctgagggggcgcagctccctgggtgagggtgtccccgcccctagggggagctgcacgcaggggaggtggatcccttcggcagctgggttaagggcggtcagaccttcctgaaacagaggagtggtgggagggcggcgggaggccgaggcagagctcaccactcttgctggggctgccgggctctttgagctctcgcctctctgcttcagccgacaatggcctggttatccatggtgtcctgagccccacgcccgattctcacctggaggggcatttggtgcactcagtccctcccccacggctctgctcgtgtctcctcaccctcctgtctctgttcccccctgctccaccctggtcatgtgacctctcgctcctttaaacacacagggtgataaggacttctccataatccctgatgcccagtttttctctgagcctggagctttgtgctgccactcatcttttccaggcgggctgttagtctgagaacatgtccttgttcttggttccaaggcccccgccgggagaaatcagacagcaccatgggctgtggctcctgaaaggcaggggacaagtcaacgtcacacatctctgcctctgccaggtggtgactcaccgcattctgctccttcaggtccagcctgacggccacgagtcactgcagcacagccaggtgggcggccaggtgaagggctgtgttgccctactgtaaggagaggggctcccgaagggttggtgggatcacagacactggcaggtcctggggacccgttggagcggaggtccagagaggggtgacacttccagggtgacggaacaggtctgtgacaaggtatagctctg

SEQ ID NO: 64174 - DNA, 1674 bp, Bovine  19866881062836
  misc_feature (1)..(1): n is a, c, g, or t
nactgtctggggctgtgcaccatggagacagtgtcctgggctgcctctacccctgatctggttagaataagcccctctccttcgcatgaatctccaacctgacatttggaacatcccaaaataaatcataatattctgaagtaagatagaaaccaccactccacccactcctgttggcactcttatccacttggaaagagtttttagaaaatttccagtattccactgcagtgcccacatagcacagccctgagaaggggaagaagcatttattgaatgcctactgtataccaaccactgggctaggctttgcttgtattaaaaatctggtggtgaaagtgatgtttcctgcactaaaatttaactgcaagctctttgagggcagggcccaggtcatctgtgtaaatccaagtatctaagatattgtggaagcttaagaaaagcttgttgattgaataaatggatgaaaggatgtatgaaatttctttgccatagtagagggtaatgtcagcaaagatgactgaggtcagacaagaaaaaattcattggtaagccagtacagatggatgagggtttcagaaaattttatggacatttttcagttgatttcagagtctcattctttgtcaccaagaataccttttgggagtagattggggtggggaggacagagtcttttaaaagtttcatttttaaaggctcagactcaaaatgcaaatggtcctaagagagattaaattattgatttgatgtttattcatacacaagtgtaagtgaccgaagaggaagccattcctaagaacaggttttagtaagagtttagaaggggcggggaagtggtgagagagaaatccctggaagttcaagggtgagtggagttttgaccatgtgagggggtagggggagagggctgaggccactggagtcagacgtacttgataacctaaaccccttgggcccagtgaaatcagcctgtggtgctgacaggcccttctgccctggcaacattggtcacttcagtcaaaatgcctgctggtggggcaggaggagacaaggccggtccaaattcctgggaagtatggactgcataccgtttaaaggtgtagttcttactgttctcaagcatgtccaggctatcccaaagaggtccgtaacacatcgcctatcagaggtctgtagggatttaaaactatatcaataataatttgagggtttacgtatgcttgaaaagcatttatcatcttagtttctgacccacttatttctttggtttaatatttgttcttgtcccctgaggtccatatcactctcctggtaccgaacccagcttccccctagggaatcaatttccactctccctggatattggtaaagctgaaggcccctcccatccacacactcaagggggtggagcagtggctgaggcccaagccagtcagtgagtttcagccccgcacctctgcgtcagtgattggttcagacatgggcatgtgacccaatcagacgccccaaggagattgtttttctcgagctgctaggaaagaggcttgtagtccttctgccgccatcttgctgccttgggaggcttcaggctgatgccaacacagccggaaagcaaagccaagaggggaagaggaacagggtcacagtgttgttgtttgagtactgaatgca

SEQ ID NO: 64175 - DNA, 876 bp, Bovine  19866881100040
  misc_feature (1)..(1): n is a, c, g, or t
ncatgtctcataagcacagtgcacctggatactggaaacaggcacaggggaagtctcccctgacacccacactataatgagagctttgggctcagcttcattcacctttccagccccgtcattgcagacccagtaggtgagctctgaggggcacatggcactgcatgtggggcacggagggacggcctctcctttccacccccactgcctgctcagagattgggccatcagcctactctgattcaattgacttcttctaaaccttgcatccaggggctgccagcggccaaatccccctgattgtctgagatgttcccgacttcagagaataaacagtctcccctgtccaggcagctgtgctgaacagcattcctgtctcccagcctgtttggccgggtggggctgcagcccggtgtccacctccagcagaggcctggggggcctggtgagtagctggaagggagaggggaggtgaccatctgtgttcagactgcacagcacattcctgtgcctgagtccccatttcgcccccctgccaggcacctcagccactcctggcacaagctttttatttgtactaatgactcttgtgacttcagacaaggtcaagacaaggtcactgtccctaggtttggagccccttcacccgtgcccagaaagctgcctggggaatttgaagctcctacatcattctaggtagatctgaaggcatcacacccctaaggcttgttttacagaggtgcgggcatcgtgagtcagtgcagaagcaaggcaagaccccagggtttttttattttttttgctgtccattaccttgggatgttgtggctagaatgacgtgaggggctctgggtgagaggggcagcccatgttttt

SEQ ID NO: 64176 - DNA, 1707 bp, Bovine  19866881160289
  misc_feature (1)..(1): n is a, c, g, or t
ntttcagtcatactagccacattcaagtaaccacatatagctagtgtttactatattggacaacccaagaataaaacatctctcctgttgcagaaagtgctattgggcacctctggaaagatttgtgactgcccaaagcttcagtcctactttcggggcagagatttggacaggagtagaatattgagactccccaagtaggcatggagggtcttgctaaactctcatggagatggtagccttaggatctagaaacttgatcacaaaccccccaataattaaatcaaagctgaaattctgcctccgaagaaaaacacaaaataacttcaagttgaagataaaaacaatgtggccactgacccgactccagttccacagccccccagctctgggtcccccactcacctggctcaggctctgccgccccgtcttctgcagagccatgatggccctgtgcagagggtaccccagggcaaccaccggcccaatgaggtcttgctcctcctggctcagggcagacagcaagtcagcagaatcagggtgcgatctgtgggcagcacaaggctggggcacccgtccaggaggtggcaggcaggtgtacgggctgagggactgaaacaaaggcaagctgcaagtgtcagttaccctggaggtgacacctggctgggcaagacatttttaaaggtgccttcgctacagagcacaggggttaatattgtgaggatcttggagccctgcagacctgggttcaaatcccagctttctactgtttactcagtttgttgtttagtcgcttggttgtgtccaactctttgagaccccatagactgtagcccaccaggctcctctgtccatgtgatttcccaggcaagagtactggagcgggttgccatttacttctctaagggatcttcccaacccagggattgaacctgagtctcctgcattgcaagtggattctttaccactaagccaccagggaagccagattattcatgtgtaaaatggatgcaatcataccagatacctcacagggttgttacaaggcttaaataagatgaggtgagaaaagtgactagcaaaagggtttggcatacagaaactgccagtagatgataatatttattgcttagaacaagcctgtgagagaaatacaataggctcattctatattttatagctactgaagtcaaggttcagagaagctggcaaatgacctgacaaacaacacagttttgggacctgtaccctactcagaatcaacgcagggttctcgaccccatagcttagggagcacgggagcaggactgagcttcctagccagaacttccttcttgagtctggctggactagggcttggttaggcaaggcgcaggataggaactgggtacagctgtggtgctggggaaacccacagagaccctggactaaggagggtggcttgaaggcatttcaataggtttggctggcatcatccctagcctgttccccatgaagaagcatccaactgctaaccctgtcccctcctccagcaggaaagcctaggtgctgtcctggctccaggagcagactgcctgtgacatgtgaattccctacacgtcctcatcttctcagcggtttccctgccatggcctcaccttaagatctactctttactcctagagtgaaaaccatgcaagtcttaggatttgagtctatgcttgtgac

SEQ ID NO: 64177 - DNA, 972 bp, Bovine  19866881161783
  misc_feature (1)..(1): n is a, c, g, or t
ncacttgcctcaagtcacacagctgctgccgagagtatctggcgttggagccctggggtggatgatttggtggttggggtggggaaacctcagggtctgaagaagctcctgttgtaggtgggcttagagatggatccagttatgctcagaggagaggttacttcctcagtgtttctccacaaatagaggagttcccgcacctcccagcatctagttaggcctctcccaggaggctggagctgtcagttcctggactctggaagtgtttgcccccaagtcctctgaaaattgatcctcatctataaataagccaggctcatatgtcccagcacattgtgtgtggggtgggggataaagaaatacctaaaacagcaacttgattatgcccaaggtatgtatttttacacatgcccggatagagttcatgtacaaatatgctattcataaactcgactcagaggtttgaaggagaccatatgcccaggtgtaggctgtgcacatgtgcagttaataagcacacgccgtcagggtctgtatgcatattttgggcactgagggcaaagtctagaccctaaggcaattgcctgatacttacactaatttctaatgagaggggatcatttttcttccacaggaaccaataatcaccaagagcaacgtttcccaaatcacaggcattcacaaactcctgtcataatcttggccacccctaagacatttatataatcactcactttatacatttcttcaaatcaactctctcttttgtaacttttgtgtctgcgtgctaagttgcttcagtcgtgtccgactctttgcgaccctatggactgtagcctgccaggctcacctgtccatgggattctccaggcaagaatactggagtgggttgctatttccttctctagggggatttcccgacccagggatcgaacccaggtcctctccacattacaggcggattctttaccg

SEQ ID NO: 64178 - DNA, 977 bp, Bovine  19866881205256
  misc_feature (1)..(1): n is a, c, g, or t
ngatgtgtcaggtacgcttcagtcctctcaagcagctctttccagtggtcctcaggttcccgcccagggacactgccagcccatagctcattgggagatcaaccatgattgacaggccctgagcccaatgactgacctagtccttcctggagcatgttgtccacccctcggctctctttggcacatctactgaggaagacagagggtgaaagtcatttggggggataggactaattttcacggcagacttgtgtcagctgtgcagccccactgatgactcaggtctactccccacccttccccttcaggaagaggccctgtcataatcacagttgtgctacataaaaatagtttcagttcacagtgcatgaacactaggcctttcccctgagggaagaggaagcccatttccccacctacattcccctgacccccattcaaaagcggatccttaggggtggggtcttcacacttctccttgaatggcttgagcagcaatttcctccccggctttggggcagaaggcttttttgcagctttgcaatcaacttctcacattttctcatttgtccctcataccagagatatgggacatagcagctgaggttattgtacccattctgcaggtgtggagacccagaccaagggaggagaggtgacttgccctcctcacaccatgagctgatggtggagctgagttgtgggcacctgactcctgttaccgtgatctctctgttctggtatgtaccttctcctcagaaaatgctgtggtcacagccaaggcaaagaagaaagggggaggagagaaaggctggacagagcccagcttcgaggagcaagacattcatacaacaaacatttgtgggacttccctggtggtccagtggttaagactttgccttccaatgcagggggtaggtttctatccctagtcagggagctaagatcccacatgcctcgcagccaaaaacacaaaa

SEQ ID NO: 64179 - DNA, 3399 bp, Bovine  19866881213110
  misc_feature (1)..(1): n is a, c, g, or t
nggtgcagggggtaggatgagggtccagctttcaaaggactcttctgtgggaatccctcctccctaaacagtatgaccaggctagagatctagaatggacagaactagtacagggcaagagggggtggtgggtcattttattagatcctgtagctgaagtgaggaaggagggaaagctagccttaggtcgctggcagagggtggggcttacatgatgggcttgggggcctggccatagtatctgggaatctagaccgtggttttcttatttattaggcgagcgccagcaatctggctgcaatccgagcctgctggcctgggctgttcgtgtgccaaccaccccccacctccacccccaccaaaggaccattctttgatgtctgagcttgcttcccctgcccaccagctttgttcaccctgtttcaagaaaggctgaccctttctgactgccctcgaaggtaagggaggagcagagagtgttctctgtgaatcggagcagctccaggggcacttcctggacaggtgatgatgtgacctatggaagggcaaagacaggggtccagtaagggcctgaagaggggcaagcgaggaggaatgccaggccagaccctggactccaggcagatggaggggatggaagtgtgggcttaatccaggccagctcaccacctgattcaggcagatggaggacaattcaatgcagaggactcccagcccaccctctccatctcttccctggatcttaggctcctcaatcttcgacaccccctacacactctgcctcgcccccaccccctcctgtgaggtcacgttcggggtctttgtcttagaattcctcctgcctcctggtttctcctgccctcccttcttcctgtgtccagctctctttattgttctgtttcctcctgcctctggctccaaatgtagcaattcctgtgtccaccctctgctgctgtgcttggagggagacaccgctgcaaaagtaggtgagctcaggcctcggcacagagcaaagagatgggaagaggggagtcagagaggatgaggtgcaaagaggaccccaaaggaaggcgttcgtggcctccccagcaagtcagagtctcactggggcacaccttccccgggagaggaatctgagaatgctggcccctgcttgggccctgtctctgagcctggacactgaccacggtgggtggtgggggcagccccaggctactctctggaatgctggtgttgggttgcagtgcagatgcaagcagtgataatgggcaggaactggactttctggtctggctgctgcccccaaggccattggaatgtgaggggggactagcaagaggccccagggacttggagtgggcagatggagaccagaccacctaaatggagaggagggggcagaccaccaagagagaggaccaagttctagccttttcactgagttgcaggctacagtcaaagaagcctaaaattcctggtccatctaggaccttggaagtctgcccagccccgcagtgggatcacaggcatccagactgcatccatttggaccttgcctggtcccacctcctcgttttacagaggtgaaaactgaggccctgaggaggtatcctgcccaaggatgtgattggtcctccagcctgggcaggttggagagcccctggagtccctcgtgccgcttgccccgcccaatgcctcaccgctttctggttggggatgggggagatctttttatatctcctccagggcatactggcacatacatttccatttttctcctgatctacccccacccctgtctgtgggggtggttctgaatgtgagtgtcagccagtgggtataggctcctgacatccatggcacatctcagagagtccctgagtttccagagcaccccggattctgggctgagtagtgtgagggctacctacgtgctggctctggtggggaacctgtagtagtagcaggagtcttcctagtctaagggggctgcactgtcctaagccctgtgtatgttaatttacttaattcccacagatttccattagtaggcgttactagtcctatttcacagatgagtaaacagaacttttcactttcatgcactggagaaggaaatggcaacccactccagtattcttgcctggagaatctcagggacgggggagcctggtgggctgccatctctggggtcacacagagtcagacatgactgaagtgacttagcagcagcagcaaacagaagcccagactggttattaacttgcccaagagtacacagtaagtagagacgctgggttttaaacctggtctgcctgactcaaaattcagtggcctgagtgtccttaaagggggctagagtcccttgagaacataatcagtatttttgcctaagaaatattaatagagccatgctcctgtgagagtattgggagcaaacaacttagaaccctggccaaagtgggagccacttctgggtgtgcaagatggggctacatggtccccacccccagctgctgctggaggtctggggagaatcaggagggcagttaggctgggtgctctgctgggatgctctgcagagaaaagttgtcctacctgagaggctgggcagagtggctgatacaggttcccagcagcaggagaagtccggagggtgttgggctgtaggtgtgagaattgcttgtttcaaggaggaaagacaagttcccctcccccggggcccctcatctccctttcgctttcttgtttcccccgcataatgatgctgattgctccacatctgtcataattactctttgtttgaaaattcagaacaaatcacaggaaaggaactggtgtggcttgagtaggatccttctccctaggggttccaggggtgggggctgggtggtagggaagagacgtaatcagccttggaagatggagaagccaggctgctgattgtccttttgctgtccccttgcctgggcagggtggcctaaggcctcgtgcagttacgtggccccccacccctgaccacagtccctgcccgctgtggtagctggaagattcggctactacccatcctgggtgagtggtcgacgtgaggcccctgccctctcggctcctcccctgccctcttggccccactgagcagtgtgttggacggcaggctccatcgtcaacccagcagcactgcagggaggggcgggctgtgcctgctgggagggcacagggcgggggctttactggccatggggaggggccagttgcggctgggatccttagaacagggtgaactttgggtctctgagtgagaaccggtaatgggggtggggagggagcaccaaccagaccttcttgggatgctgcggcagccctgcgtgctctgcatttcttcaccctcactctgagcaa

SEQ ID NO: 64180 - DNA, 1838 bp, Bovine  19866881268788
  misc_feature (1)..(1): n is a, c, g, or t
ntggctgtgtaagctactcagtctatggtgttttgttacagtaacctgaaccaactctgagcctcagtttcctggtgggccacatagggataccctccctgcctagagcagaggaataatctcagagatagtgtgatgaaggtgggtcatcttaaaaattgtttaaaggtcaaacttgggccagaagtcactgatgaaccactgggtttctctatgtccaaaccttccaaattagcactgctcaaggataatgaaaacacgggcctataaggcaaaagcgggagcttctctctgtgatctaaatgagccagtagaataggtttgcaggtggctgaaacttctagatggcctgcccacgagggccggcccggaggagagggaaaggaggcaaggcgcagccctgctgaccgagccctcgcgctccgcttccccagcctcctcacctggggtgggggccttctctgttttgcccttccacactgccgcatagccatcctcgtgtttgttgaacgccacgagcttcacctcgtacagccggccagggactggggaaggccatggaggggggtcactcttgtgtcccctgagagattccatctccaaccaccagcccagcttgcccagccccccgctggacctgtgtcaatcccccccaccccccgggcggccctcctcacctagctgggtcagttcatactgcttcactttcttcttgagccggacaggccccacatcccaagcctggttccccccacgccccctggagggctctcaccatccgtctcctcctcctccgctcccacctctcgccagtacagtttgtagccagagatctgggcggggtgcgggggtggctgccaggacacgaccagggactccatccttgcccgtaccttcagctctgtgggcgcaaaagggactgggggcagaggagccggaagggaggaggagtaagagaatcaaagagaaggaagaaggggaggccggggaagggaggcaggaaggagcatgaggaagcagaaagcaggaagacagcgttgagtgaggcccttgccagagttctccccatatatctcaccactcagccaccagcctaagggtcaggcccaggctgggtctagaggagaactcactattccataagcccagagtgctgggaacgcaaggacgtttcccgggggtttgcaaagaggttggccaagagcatttctggggcagggctgacaatacctgacttagaggagggctctgtaaatcttctgaaggcatgaaggcatgggcaccagcaggcaaggggatcagaggggttgctgaagccaggaaggagggatggagccaccggagtggggagacctccttggagcctgagagtgggttggctcactgtgtgtctgatgctgtcctaagcacttcatagcatgtattttaactttattctcacaaccctacaaaataacaaacctactagtgtccctgttttacagataaggaaactgaggctcagagaagtccagtaacttgcccaagatgacacagattgtatgtgtgccaggctttgtcctcatgggaggcttggtgtgctgcgattcatggggttgcaaagagtcggacacgactgagcaactgaactgaactgaaccactctactattgggcctctcaacaaaacccacaacagtcataatcacagaagcagctattatttatttattttttcccagctgtgctgtgcggcacatgggaatcttagttccccagccagggatcaaacctgtgcttcctgctgtggaagcatggcttcttaaccactggactgctagggaaggcccctgtttgcta

SEQ ID NO: 64181 - DNA, 2200 bp, Bovine  19866881274885
  misc_feature (1)..(1): n is a, c, g, or t
nggaggaagcatacgcctcaaattgagtgcactagtagctatggagagggatgtgggacagggtgagctccatcaggggcgcttatactttatcacttggattttttataacaagaatataatcaaacattacttgtataagtaaaatgaattttttaaaaagcatgaacaaatcaatgcgtgagcaactccaaagatccctctgcgtttatcccatatccatcaaagtaacctgattctgttctagcagaaagagaacatgctgagcattctagtccatttggatgtttcttggaaaaaaataataaagcatattgtggggcatcacctctggtgagtttggtccctctgacccccagttttttctctctctactcctgaacagatccccctgtgaccctgccaccacaagggtcttatacatcctggatgtcactactgccctcccagaccaaggataaaatctacacatctgggcagatcatgcccagccctgcttgccctgatcttttcctgttccccacaaaagtcacacggaagcacagacttgtccttcttggtgagatcctggtattctgcccatcctgctactcctcctggaatacctctttccttctctgagcaactccaaatcctccatgtccctggggactcagcatggcgttgtaactgttagtgctctctgattccagcccactgccaaggtgtagagtcctgctctgggcttctgcgttgtatacagggcttaccccataggataactgatcagactgttaacctctcctttattcttttaatgttgtatctttagcacctggcccacagcaggaactcagtatatatccactgacaaaactgaagaaaggttcattcccccaacactctgatagcacaaatgcacacaattaaatatttgaatttgcagaacaaacagtgggggacgtcagtctgcttgcctctttctccaacctcccattccctgtaccctgaaacccctatgcactgtggtctagatctgaagccccctccacacaaccctagcctaagctgcagtggacaaggcaggggccaggaagctgggccgttgtcccttgaccatctgggagtgaaaacaaaaagggtcacccaatactgaccacctcatcagagataattttaaacatctgttgattctaatcatgatcaacattctgtaaaaatggcttgtaatattaagagattttctaatgttgaactaatttcacatttctggtaaaaacccaacctattaataagtaattattctttttaaatattgctaattttaggatcctaatagatgatttctatatttatactcttcagtgacattggcctataatttccttgtatcattcttattagatttagtatcaagattacactatcctatttttctactctggaagaatttgtgcaagactgcaattacttagttcctcagtgattggcagaactcaccaatgaaaccggggtaggccctggagttttttctgagagaaaacctccgagcacaaactcaatgtctttaaagcctataggcttttgattttgtatttctcacagaagcaagtttggcaagttcgatttttctaggtaattccaaatatttggattacaaagataactaatatctggaaggctgaccctgaggtgaactctgcaagaaattaagtgcctcctgaatcatcagagaaataacagcttacatgtgcactggacatatgttacaatttataaaagtactggccatatattaggtcatctgaagatgaggtcccggtggctttgatgacttatgatgtctcattatttgcaaagggatagataacttcctatttagcagaatcagctgattcactaggaaatgctgtggaagcctatgaaacttgaattcctcacttcatctcttgggagtgtcaatatctagggtgttggggagtgttctgagctcctggaaacaaaccttccccaagaccaggctgggggtgttaagtgcggggctggcaccttcacgaaacacggattccacacacaacgcggcccggacgcagtgtcggggacgacggggcacactcaccagggccctcgaagcctttgcagtcgtggcgggcataggacgcgggggaagggccgcagcactgagtcgcgcttgtagctccgcagggccgaggcgaagaag

SEQ ID NO: 64182 - DNA, 1941 bp, Bovine  19866881420874
  misc_feature (1)..(1): n is a, c, g, or t
nagaatgccagggatgggggagcctggtgggctgccatctgtggggtcacacagagtcgggacacgactgaaggcgacttagcagcagcagcattctgacagatgagaggtaatatctcattgtggttttgatttgcatttctttgatgattactgttgttgagcattcttttcattttctttaatctgaaatagttctctttccatttttttttttcatgacattaacatgtttggagtccaggctagttgttctgtagaatgttccacaatctggatttgtctgattttttcctctcataattagaatcagtttaaaacttttttttttttctggcaagaatactacattgtagacaacctttctcccttgtagtgagtaagctgtgggatgatactttgagatcgtatataccctggactctccggacagtttttatccaatggttctgatatcttactccttttaaaagtatcattctgcaagtctgtctcatcaatcttttctgtattaatctggttttccttccatttgagcatgaaaatagacatttgagataggaagagagagtagtaaatctgtttgaaacatcttattttctagatgagcagttaatgtttcgcccaagagcagtcatgtgcatgcatgtgtgcgctcagcttctcagtcgacccatggactgtagcccaccaggctcctctagcagtgggatgttctccaggcaagaattactggagtgggttgccatttcctcctccaggggatcatcccaacccagagactgaacccacatctcctgcactggcaggcagattctttaccactgaaccaactgggaagcccctttttttcaaagtaaccctctgaaaccctttcatacttatagcaaatctcaattcagactagcctcactttaagaactcagtagctagaagtgcattattaaaattagtttcacctgcttttttttttttaactgtttaaaaacatgccttgacatgcataaaggccaggggaaggagagagggtgaagctgcactggcctttacacacgcctaggagatgcctatcggagaaggcaccccactccagtacccttgcctggcaaatcccatggacggaggagcctggtgggctgccatctatggggtcgcacagagtcggccacgactgaagcgacttaatagcagcagcagcaagagactcctatcccttcttccgtcagccaacccctgcttgtccttcaagattcagctaagcatcacctcacctacgaagccttccttgactttctgttgagatgtccactctcagcagtgctaaatccctcagcacttaactatatcattacacaagatacagtaaagtttagtcttacttttctgtcttccccactaaggggaatttaccacagaactgataaaccttaaacctcagggtccctctgccccctacacaaaccgttccaaggcctcatgtttaattttgtagcaatggttttatattccttttcttaaagagtgtcagaccccacaaaacctggatcaactcctgttcctctgacaggctgagccgcttgtgggctgggactgtgccttatttctgactgtatccccagttcctacacaggtctctgacaaagagagttcataaatgtttgccaaataaacaaacattggagttctttagggcttaatcctaaactctctctccccctctccctctctttcagagtagcatcagctggtccttgattttaacaaccatacatttgttggtaattgacaaatttctacttccagccctgaccttgttcataagctttaagtccatttgtgcaactgcctctcagaggcatccactcggaggtgacataaaccctcaaactcattccagggtgggaacttgtctccccggaacccgctcttcccatactcgtc

SEQ ID NO: 64183 - DNA, 1183 bp, Bovine  19866881510984
  misc_feature (1)..(1): n is a, c, g, or t
nccccccagcaccctcaagactgcccccgcggccttccacggccggcgccatgcccccgctgcggagccacaagcccacagttgcggtaaggaaactgtccccttggccaaggccacagcttagcagcgagacccccacatctgggtcccctgcctggttggacactcctccctaccagctctcacctggccctgtaccatgctgtccttcctgcagccctgtgcctagagtattccctgcttcgaggtccccttccttgtttcttgctgtgtctccttctttgcttctattagggcacctgttaggataattgtaattacccagtatgcgtctcttccaatggaatatgacttctcttagggcagtgattggattgcatttgtttccagagcacccagagcacacttggcccccagggggagctcagtgaatgtctgttgaatcaatgaatgtggctcagatctagggcttcccactgttcaaggattgggtgagttcaatcaaggaatattcacagcgcagttacttcttgcaagagactggattggaagagacaaagtcaaaagcatgagacgaggagattggcaaggaagagtgagatacggcaacactgcccggtgggaggggtcaggtcctgagggggaggtgaaggctgctgcaggctggggcggcttcaggacaaaggatgtgcaccaagaactgggagcagatgtgaacgcacagtgaaaccagtaaagctggagcttctggcttagctcctcccaaggctttgagcaagtgtgctcagttgctcagtcgtccttctttgggacccccctggactgtagcccggggcctcccaggtggcgctagtggtaaagaaaacgcctgagatgtaagagacatgggttctatccctggttccggatgatcccctggaagaaggtatagcaacctgctccagtattcttgcctggagaatcccatggacagaggagcctggcgggctacagttcatagggttgcaaagagttggacacctcttagcatgcatgcgtgcacggactgtagcctgccaatctcctctgtccgtgggtttaatcccgacaggaatattggagtgggttgccatttcctcctccaggggctcttcctgacccaaggatcaaacctgagtctcctgcggctcctcaattggcagga

SEQ ID NO: 64184 - DNA, 774 bp, Bovine  19866881557711
  misc_feature (1)..(1): n is a, c, g, or t
nagccccgctgacctggctctcggagaactggaacatctccatggcctcatccaccagcccctcctcgtagccctgtcgcagcagccggtcacaggcgctaaggtagctgagaaactgggcaggaaggggcacagagggaaggacagtaagagcaatgcccaggacagcaggtgtggtggaggaagcacccaagggcctcaggaggactgagctcagggccaggctgactgggcaaccaaccatacacagcatggccccagagatccatgagccagcagagagggtcagaggcctccctggggacaggtggacagcaaagcctcaccaactgtccaaggtgggggctggagtccaggaagagagctgccggggtgggtcaaggtgttcccagaacctaagtggggaacaggccaggcttcaaacacggtgtctacccaccatccacccagcctgctcaccctccttggtgagcacccacctgtgtgagggtgcctccttttccacccacctcatgcacccccaccccgcctccagacacataatatctttgcgatccaggactccacgggccccaccccagagcaatgttgcaccaaagctggaaggagaggggacagccaagcgcccacagggccgtgcacctcttccagccactccctgcttattcaccaggggctgcttttgccctcaggataaagttctgccttccaaccccacgttcaaagacctactcgctctgtcagcagcctggctgcttccctcagcaccctcag

SEQ ID NO: 64185 - DNA, 1561 bp, Bovine  19866881829486
  misc_feature (1)..(1): n is a, c, g, or t
nctccacagttaaatgagaggattagaggggccctagagctccctcctcttcctcttccaccactgctccttacactccctctgaaccctccttcctgttttcagcagagcagcagcctgtccctacaggtcttcaactgtgggggcctcatcttctacctccagttcttattaaaacctttctcttgggatgtcccaggcggtcccagtggctaggactccactctcccaaatcagggagtccaagttcaatccctggtcaggcaactagatcccacgtgcctcaactaaagaccccacatccctcaactaagactcagtgcagtcagagaagcatataaaaataaatatttttaaaaaccctttcttacacaaacagctatctcactgagaagaaggctggtacattctccactaccttgtacatgtgtatgtgtttatatgtaactgtttgtgactatgagtgtatctacgctttaatgtgtatgcgatgggcagagaggaagggagagatgatgggcgccccctcctccagggagaatggatccatttgctgatgtctctctgttttcccaacacagagacataggcttctagggcacttacccacacactccagctttgtgaacattcttcaaatatctatttgtagcgaactcagctaggtaccacctcctcctctgggaacccttcctcatagccaaggactgagataactgcccttcttctctcttcaggagccctgtgccctgtacactcctcccacaaagcgttaattgcattctattgacattgtctgtttccttgcctgccccatctctatggtgaaaaccctagaggacaaggaccgtgtccagcatcccagcacctggaaccttcagaacctgtgtatcccagtaagatattccacactcaggggccccacttctctgtgcccatctccgcagggcagagcagaccaaacccaatacacctgtggggctttccccttggggtctccaccctagggccttcctgtggcccaggcaaggcttgctctaaccctgaagatggaggcagcctggaatatagggtgtgggtgacgtgactgatcccgccccaccccagggtttccactgcagggagccttattcctttttttcctgaactttttggccctggcctgaaccttgctggcgcccatgggcttttaatattttccgttcctggctgttgtacaatatttcacctcaaaaatgcatcctcccccccgaccaaagggcgcgcctctccagtgaaaggacctggctgggtgagtggaagtgacccaccgcagtctgaagcttggaggaggcccagcccagcatgcagagatagagggggcaagaaatgtctccccacttctggggagacagggccagttcatgagccagcctgaggcctcgtggtcccactggaagcccctctggaagcctgggtgcttccagcagggtgcaggtctgaaggggacccttgtccctttcacttgccctctgaccccaggcaagtggtttcatttctctgagcccagtgtccccacctg

SEQ ID NO: 64186 - DNA, 1236 bp, Bovine  19866880339909
  misc_feature (1)..(1): n is a, c, g, or t
nactggaaacaatccgagtgttcctcaagcatagaatggataaaccaaccatggtccatctgtacaatggaatactagtcagcagttcagttcagttcagtcactcagtcgtgtccaactctttgcgaccccatgaatcgcagcacgccagccctccctgtccatcaccaactcccggagttcactcaaactcatgtccatcaagtcagtgatgccatccagtcatctcatcatctgtcatccccttctcctcctgcccccaatccctcccagcatcagggtcttttccaatgagtcaactcttcacattaggtggccaaagtattggagtttcagcttcagcatcagtccttccaatgaacacccaggactgatctcctttaggatagactggtcagatctctttgcagtccaagggactctcaagagtcttctccaacaccacagttcaaaagcatcaattcttcagcactcagctttctttacagtctaactctcatatccatacatgaccactggaaaaaccatagcctcgactagacggatctttgttggcaaagtaatgtctctgcttttgaatatgctacctaggttggtcataacttttcttccaaggagtaagcgtcttttaatttcatggctgcaatcaccatctacagtgattttggagccccccaaaataaagtctgacactgtttccactgtttccccatctatttcccatgaagtgatgggaccggatgccatgatcttctttttctgaatgttgacacatgtatatgtataactaaatcactttgctgtacagctgaaattaacacattgttaatcaactatactccaacataaaaagtgctcactttgctgacatttccctagacatatatccaggctccataaatgctgtccataataaaacacaggctgtccattaacaaaccgaagtaactatgcataataagacacaagtcattactgctccattaccagggagggggcattagtggaaacacctggaacagatttgggatttttttttttttgtccctaacaagccttttcaatgaactgtatgctcacttactctcatgcttgtatagttcagataataacagctctctgtttcaggcacagatctgaggtcaatatcgcaagaagctgtttgccaataattctgctttcagaccggtgatcaggtaggagagaagatttgcaaaagcagaagagggaacagaa

SEQ ID NO: 64187 - DNA, 1381 bp, Bovine  19866880396543
  misc_feature (1)..(1): n is a, c, g, or t
ncatagcgactgtgtcacagtgactcttcctccctcccaagcccctccttcctggctgcttagttgccaagctctgtccattctttctccctctacttcttgaatcagtccttttctttgattcttgctgccatcatccttggtcaacggtctcattttttctctgctggacttttcctctgtcttcccatttagtttcccaataacagctcctaccagctgcaatccattttacacatgctctcagttgagtcttctgatacatgcgtctctgttcactcttggtgatgccctgttgcctactgttcacagcccaaacatggtgattctgcactgcttaccaaccaaaatccaactgatgaagggacagctttattcatagacaggaagctgtccagagactcacatgtcaccctatgaataaaggactgagacccagaaagttgctcaagcttcagtagcccatgtactagtggtaaatttcatttgtcctatttcaatgggtttctctcctctacatccgccttgtcacaattagaaagtcctttcctgtgtctatcctgaattatgcctcaagctcttgaattcagctcactttaacactattacatcttttaatagtgagtcccactctcagaaatgagatgagcacagtaaaaaaaaggaacaagggactactaagaaaaacactacagaatgaccacagcttgagtggagaagatctggaacagaacgaggagctcacgggcaactgtgactcttgtttgttcgataccctgcatctcagggccacaaatgtccacaggctattctcttgactttgagggggatttctttgccatacttatgcttcagttactgaaaacacaagtatttattatgtatcaccacaattagaccataataatactccatggtgatgggaatggcttcatggagaaatatatttgggtaaagatccttgggtatcagagcaatgcataaagatcatagaaagcaacttggagaataatgcatagaaaaattactcagttacttcacacatcttgacagcattgtcatttctggggctgaatgcaacagtggctaggaatggatattaactcttcacagtgggggaaagaggggaacacaccatatcacacacaattgtgaagattccagttctatacagcttcttgttatgtgtgaaagatggacataaaggaatctccctctccataaggcctctgacatttgtattccccttttcccagaagtagcatgtactgcagtaagagcctaggggtgaagagtaatcttttctttaaaaaaaaaaagagagggagagaaaatgaagaaaagaaacaagtaaatacagactctaaaggacaatctattg

SEQ ID NO: 64188 - DNA, 741 bp, Bovine  19866880459353
  misc_feature (1)..(1): n is a, c, g, or t
nattaaaaaaaaaagtaggggggaatctagttaaaaatacggtgaaccagtgtgccctgtgaactgaattgtaactgtgtgttgcaaggaagtgctgcattgcatttcactcattattccctgcttttctctcaagcttcctgtcctgtgtcccgaaagctccagttcacttctttctcttttcttcccacaacgcactcccccccttcatttctccgccttattttttttttttatctgccaagctggatttgcacttttaaagatcagtatcaataatgccctgcttgtttcggtggcactctccctttaaaagacagccccctctaattgatgcgtctgggctagtctagactggtagtgattgaaccaaccaccaattatgttattcatttcactgaacttcactgatgggctccgtgaggaagaaggggtgttgagaaacctgcccttacactgaagcagttccctgctgaaatataaaatctcatgtgtcgttatgcactcctgattgcctgtgtgatcaatcgtatgatagcaacctcaggacatgagcaacccacttgaaaacatgtaaaaaactgaaagagtgtcttggaatagaaattgtatcactagtattaaattactatgctattatcatttaaaaatcatagaagaatcacatctagtgtgcttttattgatccccgcatatattttcatagaataagatgtagatatattttgacttccaaaagta

SEQ ID NO: 64189 - DNA, 1114 bp, Bovine  19866880480689
  misc_feature (1)..(1): n is a, c, g, or t
nttctgagaagatattatttaatgagtgcatataaattgaaatggtagcataagtgggaagtaaaggagaataaagactaaaagtaggggtgctgtcttctttccttcttttttctgagaattgaaggttttcctgaattatttctagggctttagtgagaagagaagccaggtgaaatttttttctttattttattttacccatccaaagaccagctccaaatattatactccctcagtctccctggaccatcagaattccctgctccagcttaccacagctcatgaactcaagcccattatttttctcttttattctggatcctgtgtgataatacaagacgcctattgtttgtgccatctcacagtggcgacttctggactctctgaagccctgaggtcactcagagagaaaagtaatagtaaccctggggaactcagagtagccctgctcgaaatgtttaattttcataagagagtgatgataacttaaatcagtagcaaatatatagcagagaaataggcccctggtccacatagagaggatcaataaaggttctgcttgcaagatgaagtaaatcagagagctggggtaattactgaacaatttttctccagaacctctgctcaggaggggtttaatttgagtgcttactttaaatttattgtcccctaaattcattaagtttatcagattttacttgtgcaggtccaatctcctctctcagtttctctctctctccccatccacctcttttctctcctccgatttcctgtgtgtgtgtgtgtatatatgtgtatttttctaggtggctggaaattgagtgatgatcctgtaccaatctcatccttagtataaatttcattttctaccaggactggcaatattatcaaaattgttaacaaatcagtgtgttgagttatggtcccttaaaggtgaaagacaaatagttgactatcacacattacccttagtatagttcttttggtaggatataattattttatgtttttgctggcatggctagcaccaggcatcccagtacatcacatatactctgttgcttaaacctgttgccatgacaacctcagcattctcccacagcaacaaaat

SEQ ID NO: 64190 - DNA, 1138 bp, Bovine  19866880482901
  misc_feature (1)..(1): n is a, c, g, or t
nggggtggtttggccttggcttagccagcagctgatgcacaggaggcctgttcgcaggactggcaaagtgcacgctaaagaaagaaggaggaaattttgaaaagcaaccctggggagggttcattcttatgaaaacattaaaaaaaattttttttaactgaatattctcaaaatttgatcagtcccagcccttctctccactcccaccgaattgtcccctacctcccctcgtcaaagcataaactacagagttacagtctctagatttggtgtatcgcttcctgcccccgcctccccctccccgcccagttctcggtcctctattgaaacacctcgcccaggcgagcgccctgcagctcacatttccccccctggctcggatggtgctacgggagctgcagcctgactccacttccaatgggtgagtttaaaacgctattcgtatttatactttccaagcctccaaatcctcctcctcggtcttcttctaaaaacccaatttggatggttttgcatgcggcatgttcgcccgggggaaagagatgcctccgattttctttaccgtccttagggctagttgtaaattaaagctttgaagagacgttcaatcctgactgtagaccgtggtttgcaaaacatgggcatttctaagtctattcatactattttccattttactaaactcttttgcccaaagctccaaagagttttctctgatagactggcgattgtgtgttcaggtatgtatatgcgcccacagaccctgcgtctgtgtgcctgtatctaagtggaatccagatattgtggacgagggctacttaagagagtgagggaatattctgccacctgtttgttgtcttttagtcaacaacctcgagcacaaactgcttgtcattcctgttttgctttgttttgtctcaagaaagaacaatttagcgcgcgcctctcaatccctgagaccctaacttgtgatgtttaccgtttaaatccacgggttaggctcttgggagctgcgagtcgcgcccttgcatcctggaaatttggtggaactttttttctttgaagcaaaaacaaaagaaaagaaagttggtcccgaagtgcctgagtgcacctctgaggttttcattgttagggtggg

SEQ ID NO: 64191 - DNA, 1481 bp, Bovine  19866880483105
  misc_feature (1)..(1): n is a, c, g, or t
natttaatattcactgtattcttttaatatcatgcattctagggatattgaaaaattcctaaagagagttcaggcatcctcccaaggcatgtatcacagctaccatacatcttaaaatgtattttgggaataagaatttaagtactattaaagtgtctctcccatgcctttgcataaaaacatgaaatgcgaaacatgcagtcaatgaattaaagttgactgaacacattattttttaaattgatgtaagcaaaccaatattggattgagatatattccttgaactatcgcctgtatggttgaactattgaacaagcaccccaaattattcagataaaaattctctcattgaagaaaaaaagtttaagtcagaattaattcattcagatagcatctgtggagtgccagttatgagtcagccccttttctaagcacaagagagtcaatgattaaaaagacacgcagcctactccgcttgtagtccaataagaaagagaaatgtctggataaataacgacaatgcaaagtgaaacagcaattctcatgaagtgccctgtaaatgcatagtgaggataacaactgtttagtacagggaagtcagcaaacgtatcctcaaaagcgttaatgcttgagcctggtcttaaagatggatgggagaatagaaagtttatcagtcagagaaattagaagaaaaacacgtcagggacaaggcatacgaacaaagacatgctgaaatcatgaaaaagcatgcatgtatgcatgctaagtcgctccagtgtgtctgctagtctcctctgtccatgggattccccaggcaagaataccggagtgggttgccatgccctcctccaggggatctttcccacgcaggaatggagaactctggtctcctgcattacaggcagattctttaccgctgagccaccagggaagcccgtgaaaaagcataagcacttttaattggtgcatgatttgtgtagttggattttagaattcacttagtgaaaagaagtaacagatgaggttggggtgatagggtggggccaaataacagagggacctgaatgctttattagggcacttggactgtgttcttgaaagcactgaggaaccagtaggtcttaatagaccaagtgatctgaattagatttataatttgtcccagtgagatgtccatatgaaccaaccttcaaataattactcaggtctggcaatctatatatctcaaaataattgtcagttgcatttttcttttcttgcatttagtggtttggcattgcatgtgccaaccatgcagatgaccaactgaaaggtttagtttatatccagatgtcttcagtgttgtatagacaatcacaaacattgaaagaaaaaatattccgtgagggtgaaagtccctgtaccatgcttcccaaataaatctttgtggagggtatcactaatagcagttccactctgtctaaacacagttattaagatca

SEQ ID NO: 64192 - DNA, 1465 bp, Bovine  19866880599601
  misc_feature (1)..(1): n is a, c, g, or t
nggagcacattctaggacccttgtgccaaggtaaatgatctgaatctcctcaaccctttcgacccattaaacagatgctacacaaataacaaaagatggaaaaattgtaaatgactaatatccattttattttacttgtgttaatggccacccactccagtactcttgcctggaaaatcccatggacagaggagcttggtgggctgcagtccatggggttgcaaagagttggacacgactgagtgacttcactttcacttttccttttcatgcattggagaaggaaatggcaatccactccagcgttcttgcctggagaatcccagggatggcggagcctggtgggctgccatctatggggttgcacagagtcggacatgactgaagtgacttagcagcagcaaagattaactttccgatttgtaaagaaaactaggattgactgagcaagcacagcgcacatcccctgcgccaggtaaaggatgcacatgctatctcactgacgtttcacaatgaccttttgaggcacgacccgcctatctagcagctgatggaactgaaggttacagagatggtatatgcctagaggcaggacctgtgggttgcactgggggttccagccaaaattcttaagactttcaaaatcagtactctttcctctatgctcttccttggttctctttaatgatttatgtccctgccacactctgggtcatcattctaaactctggaagtcatagttcaacagagtagaaatatgtattattaagctgaaaaaaaaatttactgaaataaatatacatccaagaagcaaatgctttgctaaactcctaaactctgtggcttaactcctttgtctctttcatctcatattgaaatatataagaatcattccaattacttgaggcattgggtgagttgattccagatttccagagacttaacgagaagtttttcaagtctgaaggatctttcgtggataatggctatttgggaaaggagatcagatgagcagatgtaatgctttcacagctgtcccacccacggggaacacggggtgaaatggaagtgcaggaacctgggggtcatgcacacctgagtgagaaccgtggcttcacccctggggaaagctgagcaaacctcttcccttctctgcacttcagttttcatctttaaaatcagaatgatgccatcaagctcaaagtggtattgtaagaaccaactgagatgatctgtgcagaagggctggcagcagacgtacccactccaactagaaactaaacttcctgacaaacttttagaaatgaaaagctcagtttccttctcaatcccttcttttgtccctcaattccttctgatatggctgcttattgacatcgttgcttattatgattgaataagctgggttaaggggaacctccctggtggtccagtggttaagactctgtgctgcctctgcaggggg

SEQ ID NO: 64193 - DNA, 901 bp, Bovine  19866880616575
  misc_feature (1)..(1): n is a, c, g, or t
nttatgtattggtggtatatgacctggggaagagaaggaaatgtccccgttcttatataaatgtatgcgtgctcaaattccaaaacgctcatggagggagtaaactacttgataaatacaattaactcattactgaccgggggatttttgcaaaacgaatgcctgtgaccggcagtttttattttggccagccaaagattaattctggttatttctttgtgagttactacaattaacaggtatacctgacacacctgtaaagcccaaaggagcttttcggccaacccggcgtgtatgatacacacggtgattttcaccatgctagcatagggtgcggataactcaaactgggcacctaagccacccattggaatttgggatggataataagatccctcctctttaaacttattttccttttttggttaagttcaagctaccatgaaaagaaggttggccacctgttgatggggggcaggtgacccaagaatgtcagaagctgggctggtttcagcactgattcttgtgcctggctggttctgctgctgccgtttctagctgggccttgtgatgtagggatgggggtcagtagtgggaggtgggggtcacgcagaagtgccccagaactcaccaaagactgactgtcttgcctttaggggaggacgacgaagatgctccgatgataactggattttccgacgacgtccccatggtgatagcctgaaagagctttcctcactagaaaccaaatgttgtaaatattttatttgataaagatagttgatggtttattttaaaagatgcactttgagttgcaatatgttatttttatatgggccaaaaacaaaacaaaaaaacaaaaaaaaggaaagaaaggaagaataaactttgtcgtaatcaa

SEQ ID NO: 64194 - DNA, 981 bp, Bovine  19866880640376
  misc_feature (1)..(1): n is a, c, g, or t
nattgctaaatgcatttcagacagaaggatggagttcaccccaccgcaaagcctgaggcactgcaggagcaaaaatgcctcaacgcgaggtggtgatgggctagtcgctcagtggtgtccaactctttgagaccccgtggaccacagcccgccaggctcctctgtctgtggaattctccagaaaagaatactggagtgggttgccatgccctcctccagggaatcttcccaacccagggatcgaacctgtgtatcctgcattgcagaggttgattttttattgtccgagccaccagagaagcccaccaacacaaggactaaagcaaaaaaaacaaaatgaaaaccccagtctcgaccagcatctccctgagaggggcaaggtgagctggaagccgtatcagaggtgggacaggcctcctctggagctccaacagtgagcaagaatcttggcatgttcagactgaggcaaagctcgaagaggttctgccctcggcatgcccagcggggtggaggatgagccaggggtcctggggggccacactcaccactgcaggcatgctcatcactctcgtccgagcagtccaggaagccgtcgcagcgctcagagagcatgatgcaggcctcaccgtcctggcactggaactccagggccgtgcaggtcagcgtgctgtgcgtggctgcaacacgtgagggtccacagtcacaaaagcgttcccaggttctgggaaagggaactcatcaactagcgctccccgccccatgcaaatatgcacacgatgcgccatgactctacccatacgcaaaggaagccaaacagaccactaaaccagggtggtgatccagcagcagagagtctactaacaacgggtctttatagccttctggggaacttgtgaagcacagagatttgctccaaatactgaggcagaaacacagcactgggcacgtgcaggatttacaagctcctcagtattcctcaga

SEQ ID NO: 64195 - DNA, 3115 bp, Bovine  19866880736415
  misc_feature (1)..(1): n is a, c, g, or t
ntgactcttgtgactccatggaccgtagccctgccaggctcctctgtccatgggattctctaggcaagaatactggagtgggttgtcatttccttctttagatctttgcattgtggtattaattgtatcactttaaaaacatactgatacatctccagacaataacatttgggtaacaaaagacatattaatacatttctggtcaataatgtgatatctccctgaccttaaatttctccatcagcaaattgtcttttttccctctctccctttcttccttaattttcctttctttcctttaattcctatctgctgcaaatctccatgccctagtagagaacagaaaaaaacaaatgaaacactaaaataaccacacaagactgttgtaattaaatgacctgatatcaaggaataagctctatatgcatctgtaaagcactctgtaaaattatgatattgtaatgggagaatgacattcttgggaagactggataacacagaggttaggaacctgaaccttggcacagagaaaacaagagtttcaatcctacatgctgtgtgatcatggacacagtaaattttccaagttgaaatttcctcatctataaaatacaacatgctaataaaattatataaatcaaagagctgttgtgaagattccctgagtgagactatatatataaaatattaggcacgaatgcctagcatatcataaatgctagatagctataggacttccctggtggtccagtggttaagacttcaccttccaatacagaaaatacaggctggatccctggtcgggatcccacatgcctcctggccataaaaccagaagcaatattgtaacaaattcaataaagactttaaaaatggtccacatcaaaacaatctttaaaaaattaaagaaggttagctgttattattattgttaaggaaggcaaagtagcttgcactattatcatttcatttttattgtttaacagtaataaggcaaaggaagcaaaggtcagtgggggttgaaggagtcaagacttctgaggtgtgtcaatttcctctgaagaaaggcattcttgaaagtagaggcgttaactgtgccccagtagagttaatggtgaaagttcaagctcttgagcatccttttctgactgtgagctgtgtgaaggcaggaattacattgtattcatctttgtaccccatatcttaattacttgtgcttagtacagcagagaaccagacaaacgaaatgaatttgtttatattgccttgaattcaaccttgcaaaggaaaaagccatgagtctgctttcctgagagtttttaaggtcttgctggagttaagttgggagcatacaaccaaggaaagggcccaagggcttggaattccagctcaaatcccctgttccaccacaagctgcctctggatttcagaggccctccattactgactaggtggccttaggtcccttgaagctggagttaaagataacccgtatgcaatatttggataagtgccttaataatgtggactctaaagatcatgaggcaataagaatgttccatttagcttatttttgctgtgtgcttatcagagcttggagcacatggtccaggacattcagatggctggggttaaaatgattaaagggtgtggggtctgcatttggcttaatgctgctaagaaattccttggctaaaaaaaaaaaataataataataatctttcttttcttctttttatacatttgtataagttgatcgaaaaaaaattctttgcagttcaagatggagttttctttttcctttcctctctgtctcgggggccttatctgattttaatcagcactggcttgatatgatttgaaacagctgaggctgaaatgcccttaaaaaaatatctgaagttagaactcttggaactccctacctcttctactccccttgtagcagtatgtgctattaagtgtaaaatattggggattatgaatttacccttaaaacttttcagtgccctgcagagttttctcagcaatttgaaagtcctgttaaccataatatagccagttcttgattattcacaaaaaaggaaatgaatagtggcacagataatccaaaacagaaaaacaatcaaaatgtttcttatattttactttggaatgctttgtatggcttttgggggttcagattttccttcccagggatgttgcactcaggaaaaagttaaaatgagtttgcattccctaagcccacactaaatagctgaagggggatgtggcccagccacatgctgggtggcagggagaaggagcctgaaatcgaggggaaagaattccactgataacctagaagtggaaaatgcccatatgaataattaagtgctgactggaatataattcagtcttgtaaattagtgtggacaattttccaccctacatttttgaaaaaatcaggttattctcttcagtggagttacactggtagttaaaacaaatgacctcagcgctctttattgctcccagtccattggtgctggcactgtgtggaatcaggacctattgctaatgctgtggggagttagtcctcagctaatgcacaccagccccatcctacaccatcttcaaatgaacatatataggtttataaaatgcctatactaaatatcatatcatccactaggatagatatcattattggttttgttttacagataagaagactaaggctcggacaggtccattactgatttaagataacaaagttagttactgggagagactaaatttgagcccatgtctctcttacctagtttaggataaggaagggaaagaaatagaaatgattttaaaaaggaggtttagtgcatgaatgaatggaagttagtgggtaactatggtggaatgtgggggatgttacttcaggaccaggtacaaatgccatggagataggttttaatgatcaaacagcacttttttgagagctctgaaatggacaggatgggattctcagtggctgaaataactttggcaggaatatacgggttagaaaacaccagacatgttcacagaacaatgagttggtctgaaaaaagaatttgctcaaggtgaagagatgttaaag

SEQ ID NO: 64196 - DNA, 3085 bp, Bovine  19866880758658
  misc_feature (1)..(1): n is a, c, g, or t
natgcttttgaactgtggtgttggagaagactcttgagagtctcttggactgcagggagatcaaatcagtcaatcctaaaggaaatcagtcctgaatattcattggaaggactgatgctgaagctgtagctccaatactttgaccacctgatatgaagagctgactcattggaaaagaccctgatgctgggaaagattgaaggcaggaggagtagggaacgacagaggatgagatggttggatggcatcactaactctatggacatgagtttgaacaagctctgggagttggtgatggacagggaggcccggcgtgctgcagtccatggggttgcaaagagtcggacatgactgaccgactgaactgaagtgaactgagtgagctgtaggctgcttccaaatcatagccccacagagactaatgctaaataatgatactctggatgccataatgccatttcaccaccatgatcacacagataatggagacaatactgattgcacatacttttctttttttaatcactgtgcagcacacgggatcttatgtccctaaccagggctcaaatccatgccccctgcaatggaagcatgcagtcgtaaccactggacctccagggaagcccctgtgtatacattttgagaactcaaaataatagagggtaaattctttcctgtaccatgcttttgagtttacaaaacacttcaccacccattgttacctgaggtccacatgacaacctggtgagttaggattgatattaacatatccattctacccttgcagaaattgatcatgagagtttaaactctctggccacgcagcacataatttaatttgtggaaacgggactcaaaattcagtctttttgaatcaccctaggtcagtctgcaaaaaggaaaagagtagaaataaaaattgctccaggcgagagaaacagcaaaatatatcacacaatgttgatgtggaagcaagtatgatcttcttctgagcatttcttactttttgccttactcatcccttctcaaatcctgagtcctgagataaaggttacctcagagatggcaggaatatagtttgctgactacaaagaaaatgtacacatttcttttcaaagtcctgatcttttcaaaccaaagtaacatcagttattgcagggatgttcacagtaatatttaattcctacacattggatgtgaaagtgttttagtcacccagtcatgtccaactccttgagaccccatggactgtagcccaccaggctcctctgtcccagggactctccaggcaagaattctgaagtgggttgcctttcccttctccaggggatcttcctgacccagggattgaacccaggtcttctgcattgcaggcggattctttaccgtctgagccaccaggggggcacttttatttatccacaagatgatcccttctttcatgacagacactcaggatataaatcttttccacaataccgtcatgctttgtttctaaaaatcaaataactctttaaggaggctctgaggctctgttaagactctgaggtggcacacagatagtttatctggctacagggaagatgaaatgggctactcttctcccagagttagacagttccagttagagtaggtccaggttgtgaaagaccctccaatccaccaaccccaccatcctgctctcctactaacatcccagaagcccctccatacatcacaccaggaaaacagagtgggtcgcagagtgcccggtatgtataagcatgaactccactagccagcctcacaaataactgctattctaatgctcagcccagagtacactataatggtcggtgatacataaagtggtaatgatgacttgttttatttcactccctgtaaaggatgacaaagaatctgtacatgagttggggtgggactggagactgctatatgggaagaagggagaaaatattcaccagtgatttttgccctgcttcttaaggcttttttacacttcagatggactgaccttaggtataaaacatatgagtggaagcttagaagggtacatgtttggtttaactcaaattcattccatcaatacctttctaagaggaggggcaaattttgactcatgtgcctcttactctccagcttctgcttttcagggggtggtcttggtataaaaaagtgaccccacatttctggggtgttgtgtactgcaacctgaatctggagccagaaaccctagactctgcatttgctgtttattacccatgtgatcttagctgggctaataagccagcatttctacaactatgaaaataataattgttatggaaatgaaataaagtatattaaaaaaattttgaaaactttaaaacacccttcacgtgtagcacatccactcacttcacaaacgtgtctccatctaggtgaaagtaataaataaccaacatccttccttgtataagtttataactagaatttctaagaagatataagctattttcatgaggaagaaaaaaatgaagtgggcattcaaacagttatctaggaaaatcagaccatggaaagggtaactcagtctgttctaggcacggaggggaaggaagctttatgttaacgtggttcgatttaatattgcgcacatcagtcactgtaatcacggtgccaggactgacacaggaatgccctgctgttgaaaatctcataaagaagagaacaggacttcaccagtcgccccccaaccacccgcccagaagagttttccatcatttcgttaaaagagaaaaaaaaaaaaacctaccacatcctgctcaatagggtgactggctcctgaacaggcaagagattatttccaaacacattctttccttgcttttccatccccatggggccctgctatcattcccggcctcctgaaaccccgtggctgcagcctccatcttactgagcagattttcaagcaaaggtctccttgttgctgtgcctgccttccggagctgccggcctgcctgtcggggggtccagggctgaatttatttcccacatgggggacgcgctgctctctcgccaccctccctctttcccctcaagc

SEQ ID NO: 64197 - DNA, 1737 bp, Bovine  19866880886540
  misc_feature (1)..(1): n is a, c, g, or t
nctgtgagaatattatactaagtggaagtcatgctccgaagcttccctgttacatggttccatatgtacgaaatgtccagaatgggtgaatctgcagaagcaaaagcagattggtggttgccaggggctgagaggtaacagagtggtatgagattttctttggagatgataacaatgttttagaatgagatagaggtgatggttacacagtacagtgaatgtaccaaatatcactgaatttaaaatggttaattttatgtgcagtttttaaaaatactatggaagaagaaagccacctaaataaattgactgtctaggaagacttcctgaccataatttatgtactcttggtcgtttgctgagtctgtgaagacagtctgttttatttccttacaattttttttttttttttttgccttttgtagtcccatcttaagaccttggttttctgtccctccatgaagattcagtttctgtttgagtcacttctttcattcacttcctgactcactcattcacctgctgtccaggagaatgacaattaataggtgatctgggacagatgacagctggccctgctttgtaaccttggcaagcgtcttaacttctctggtcttagggagatatcaacgagatctttgcttgggattctttcagttttaaatttctagatttaagaaataaggaatgcattattagggttactttaaatagtctgtcagctaaattctccgattcctttactttgaattcatttatcaatctagctagacagacagaaaaaaaataaattacagttagaatgagcctcctctttttccttagacctcagtaacgaggagaatattcatctccatgtctggggtaaaacttctttgaccacgggaaacctttcttcatggtttttttttttttttttttaagattaaaaatgcctaaggcatgaaactgatctacttttcttaaggtttgaaaagcatcaaaaaagatttttttctctttaattataatatattacagaaaacagacactgcaataacttaatagcccatcaaaacactatcttcaagggtcatttaatatttccatgataaattgctatttttagaagcttatgtaaccaaacaaagaatgtgttcttggctatggccatgaagacaagttattatcgtgggagggacaaaggaatctgagaggctcatgagagacggagccaactgcagggaatagtttatagagtgccctttcttctgggtctccagtttctgcaatcaggataactcagtgcctctcagagccattttcattttttgaagtgctctttcaccattagctaataaatactcaccaatgaattttcctccgcatcttggaagttgggggaaaaagaaaatcgctatcttgtaagtattattccccatggggtctcccttctcatgctcctaatggaaataagaaataaattatacctactctaatgaaagggccaaagaccaccattctttccatagagagcacctggaaatttgcatcagattttaatgatcttcagtaactacctcactgtcatagcagagggaatgtctgtctcccattatcatgctctattttcatgaggacagttgagtggaaagatgctttggggggtcttctcagggagctgtgtgtatagagttgagctaagggaaggtggggtctgagcatgggtttccagggacttcatatctccaatttcta

SEQ ID NO: 64198 - DNA, 1561 bp, Bovine  19866880908880
  misc_feature (1)..(1): n is a, c, g, or t
nagggattacaagtagatgtgatggaggtcattagtatagggaatcaaaatttgttgaacatctactatgcgctggtgaaaatgttagtcactcgtcatgggagactctgcaaccccatggactgtagcctgccaggctcccctgtgcatggaattcttcaggaaagaatactggcaggggtagccattcctttctccattggatcttccccacccaggaatcgaacccaggtttccctcaatgctggcagattcttattgcagggaatcctccaaatgctggaagtatataaattaaacacataaataatttaatcctcacaataatcctataaagtgggacttccctggtaatccagtggttaagtatctgctttccaacgcatgggacacagatttgatccctgatcagggaactaagatcccatatgccatagggcaactaaacccatacaccacaatcagagaaaagcccacaggttgcaacaaaagatcccacttgctgcaaccaagatttgatggagccaaatatttttttttaaaattctacaaggatttacccccattttacaaataaggattctgagacataactggccctctagagtcaaatcttagaaatatagaggagtaatttgaatccagatctttctgaatccccaaatccttgcttcttttctgctttgttgctgtattcagttggtcagtcacgtccgaatctttgtgacctgcagcacaccaggcttccctgtccttcactatctcccaaacccatgtccattgagtcgatgatgccatccaaccatttcattctgagtgtgtaccttttatatggtggctatgcatagtggggcacatacattctcagtggtacccttgtagggggaggattggacccagtgtaaaattcaaagtcttgggaccagtttcaataatcagggccaagtagtgcttattcacaacaacatctaatggaatacaagggtcaaatcatgtgaaaatgccaatacttgaccatttttcatctctaaaaatggaaacttcattcaacctaataaaagtaggatcatcagtgctaaccacacttaatatttctcacacataggactgaaataaaaatctggctattaaaatggaaagagaaaaggtcattcactttggttcccaaagttgtgtatctacggctctaggccacttggatggggtcacccagctctagacttgcaacatctgcagaatcaagcctctaccgtgagaaagaaggggagaagtgacctccaagcccactcatcacatcatcggctgtgagatacgtggtatagttcctctgcaactaaaatcacctggcttgctttccagccccgtgtccctctaggcttcacagaaggctagtgacccaatgttacaggctgaactgtgtccttcaaggagatgtgtcctgacactgcagaacatgactttatttggaaagaggctcgttgcagcttcaattagttaagatgaaatcagactggagtaaagggggcctttcatccagcaggcggtgtccttcagaagagag

SEQ ID NO: 64199 - DNA, 1579 bp, Bovine  19866880916414
  misc_feature (1)..(1): n is a, c, g, or t
ncagagcatcacactacccatactgggtattgatttatcttgtcctgagcaaactcagggaggtagtgaagaacagggaagcctggcatgctgcagttcatggggttacaaagagtcagacacgactgagcaactaaacaactccaatagagaagtacccaactgagatacttccgaggacacaagactacacaacaggagaataaccgcataaaaactgtccagtctcctgatacctgttgttgaggctttgaagtattctgagatttacatttaattccatttttgtcctgcttagagtttgacttcgttattcccctgctctaatcagatctacaatatccaaatggaagttcaaagttagccatttttgataaatcgggggaaaaaagtgaagtattatcatgtttccaagctttactcttttctcagctagcagggccagctgagccacaaagtggatttggcttaatgagcccattaaaaaatttatgtctggatggtcttggtgtttgtctcaaatgggtgaagatagaaatgtaggcggagctttgcagataaacagggctggtatattgccaaaaatagacatacttactcaaacctccctaatgaaatcgaaagacagacatgttatacatttatgcaatttaattcaacacataagccatttaacccgtatttcttgggtgccgagtgtgtgttaattttggaaaatgagagttaagtaagacttactttaaggcgctcacagtctaagttaaagacacaaaaacaaacataatttcctatccatgtagtttatgcctgagatacaggtatgccagcatcttttgggaacatgaagggtgacatttttcttcattaagattaccattaacaagcactacacacacacacacatacacacacacacacacacacacacatatacacacacacaaatgtatatatatggtacccagtagaaatagactaagaattatgggagctgccttgttccttcccaattcttcattgccaaggctgcaatgattaatcttgagaaaagctacagtttagcacctgttgaaccatattagaggaaatcatctgtgttgcaaatagagaatatgctagggaggctggactcaaatggctccaggttttgatatctttctccttctgttttagcagacaaataatctgttgcaactttgctgcttctcttccctcgcttggctcttttcccatgcaccattttgttctaggggatgcctaaactgattctgcagcgttagccaaaacaaacgaggagcttggctctgggtctggtcgcagcagctgctatgattgaagttctctgcacctaaagacagtggggcagctttccgtttgacagatgaacacattttcattactagagaaacaggaaacatggcatactgggcagaaagggagaaaaagggaaaaaagagaaatatttgggaagtcgctttgttctttcttctatcaattgtggttattggttcagttgagatgttggtgaaggaggttgaccgagtgggagcctcatacccaagcgtcaggcttctcttcc

SEQ ID NO: 64200 - DNA, 796 bp, Bovine  19866880955748
  misc_feature (1)..(1): n is a, c, g, or t
nttaaggaattctagatttctgggcctgctttctttgtgattttagatgcatcttttatgctctttggaccggaggttttccacttaggaaactgggcagttcatttagaatgataaaatcaggccctttcacaacttacagggctctttagatatcagtgcagatgatgacatcaaggtccctacagtgtctggagcaggtctaggacccagtgccccgagcacccacggcctgttcttgtccagcagaatctggaggactgagaagattaagtagccaggtggactggagaaagcctaggctttggacttggacagccctggtgctatgacttcattatctttgttactctcggtgaccttctgagagtcctaaacctcgttctcatctataaatgggggggtagtcctgacctcacaggttgctgtgaaagtgactgagtttttaacgtgtacatctgtgcttgtgtgacactggtgaaccccgaggcttgagctaatgccccttcaggagactgccttctgcctttagggtagtcccccgtcatacctgttagaacacgccagctttgtagtcagctgctgagggtgatggggctgcggaggtgaaggaggccttgaccatgtttctctcctgtttcgttggcagccatctatcacacctgtgaggcctccaacttccagtgccgaaacgggcactgcatcccccagcgctgggcgtgtgatggtgacatggattgccaagacggctctgacgaggatccactcaactgggtaagtgtagggcttggcccca

SEQ ID NO: 64201 - DNA, 1557 bp, Bovine  19866880986738
  misc_feature (1)..(1): n is a, c, g, or t
nattctgtttcttattaataaagcagttaacaatcagtggttactccccagcattaaatgcagaatatttgccaccaccataattaaaactctggttggtatctacattagctagttgatctcaatgttagtcactcagagctctttgcaaacttacaattagttgggagggagataaaatgacaggatttatttgttattgatataactttagggtccacacagaggctgaatgctctttagtcaggaacactttatggaagcacattggaaagttagagtcagtgactttgaataccacttctaactgggaagttgtatgattggatgacttcacaagaaaatcaccaatatgggcatcactgcaacatcctatccctgctggaaaggcctcttgttcattatatagaagaaactgttaaaaatggacaatgatactctcactcaaacaccctgtagtgctccttgatgatgtctgggcccccaagggactgattctgccatgaggctaaactcccctggccccagctcatcactcagacacatttgtctgcagtgggtcttagcttgtgtccttttctggccaaagtcaatgtggatgttttagagctcagcattatcttagagatttgaggtcacctatcccatcaacagtcaaacagagaacataaaacttcatttaaaagattaaattgtttaatcagtacatcaccaatgttacaaatataagttaaaagagttaggaggcatttgtcttttttgagatctaggacttaagttcaagcactgaacatgaaaatattcaaatccagaagaaaaaaaaaagaagagggtgaaaggaaaaccagcacttagagaaaaagtggagtggaaaggctacatcatgattaaaatttccattatgcaactaatcaagtgtgggctatatcagaggcaaccggaataaaaactagaaacactcacatgtacccttagaatccaagacctctagaaaaatgttatccatttatagacttacagaaacacaggctcaggctaccgagtgaccattttatgatttttagagaagcagaaaataaagtgattatcttaggggagcttatatttattactttttggtctatgacttttaatattttattaaaatactattttagagtgaaggagcaacaaaaccatgaccagaacttaagggccaagttctgaaaaccaagttaaactatgaaattctctttttttccttaaaaagctttcaaagagagaaaactagtttgttaaatggcaaaatatataaaaatgtacagtattcatagagaggggttttgatccaattatctaaacaactgcctccatttctcctgcctgtttatgcatttaaattcatgctctgtcaattattacttttgttgtctcccaaaccaatctccaaatacttgaatgcttttcttttatccatcttaatcgcttgccatgtctaccatggttggcaagcatctcaaagaatcactgaaatgcttgaaatcacacaaacccaacttcgcttttccttaggtaaga

SEQ ID NO: 64202 - DNA, 1439 bp, Bovine  19866881084710
  misc_feature (1)..(1): n is a, c, g, or t
nttgagatgtgtctctaggcgccttttggcttgcctgccctgttaacatggctgtttttctttctgcctctcaaagaacagactccttaaagattttccaagatgatgtaaaaaaccatattttaaaaatctgaatgctatctgaatcagcttcatgtgcatctgatataacctttcttccagactagcctggctgtgttgatcatttgtttactgatatctttccctttttccacaaaggactggaagggttggaggaaggcaggtggtgctgaaatgagaggtatctaatgtgttttctgttcttgggggaatttgagaaagcagtaagccaacttataaaggaaaagcactattttggcaatctagacagaagagaatcctccattgcaggactggttgttgcattgattttataaattagttcttcctcttgttgatgctctaggatcgcacagtgtcctggcaaatgtgtattcacattagagcgagacagtcctctgagtcctggcaggcaggacaaacagccaacaagcgacaaggctggatttcctggggtctgggctactgcagcttcctgaacgaatgaaaaaaatgcaggtgacactcccctgcccccaggccaagcaggtcacagggcaattgcccagttgcccgctgggagaggcccaccctgttcctttccctccaggttcatttttcatgttgattgagtcatgatggctcagtgccacaaaacatctgaggatgtgccttgtagggaaaaggtcagaaaggacaccaaggatctccccttccctaaaatgcagggctcgctcgcatgcggtctgttgtaaaggatgggctggcagcgctggttggggggctctgtctctctctgcgagtggcaggagcaaaccctccatcttgctagcttcagggttgcctggctgtgttatttcaactgaggcagcacagcttgctttagctttgaagtgtgaaaaccaaatacaggttggcaaaggggagagaaggaagccatgtagccttcttggagcatgacggcacacactcagccctgtgcaccgaacacagaaacttttcccatccccttagcaatcccttgtcccgtggccttctcctgagaattgtgatgaacacagcagcaggcctggttggttgccccttcctggagctcttttctcgtggctggtgggcagatgctgtgaatttctctcatttgggaagggtccagcatatgcccccttccaactctctggtgtgtgtcttcctaatgtcgtgacagtgaggccagaacgcacacacaggcacacacacacacacacacacaggcacacagacctgactgtggtgtgtcctagcaccctgagcaatgatttaagctatttattttctcccctttcgcggtcctagagaagattttcgaatttctaatacag

SEQ ID NO: 64203 - DNA, 1092 bp, Bovine  19866881095205
  misc_feature (1)..(1): n is a, c, g, or t
ncatatctgaggaggttgatatttctcctggcagtcttgattccagcttatgattcatccagcccagcatttcacatgacgtactctgtatatgaattaaataagcagggtgacaatatacaaccttgacatactctttcccaattttgaaccagtctgttgttttatgtctggtcataaattgcctcttgagctgcatacaggtttcccaggaggcaggtaaagtggtctagtattcccatatctttgggaatgtacaccatgaaactctgaagccattcatttttcgtctgaaaaagacttggaaatgaacactttcagaatcattacatttctcccaatagagaggacactcccccacctccccccgggcccccaccacccagacccacatgttgcatgtgtgccgggtcgctcagttgcaactctttgtgaccatatggactgtagcccaccaggctcctctgtccaagggattctccaggaaagaatactggagtgggttgccattttctcctccaggggatcttcccgacccagggattgaatccatgtctcctggattgcagccagatgctttaccattagcgccaatgaaacacccgtacgctttctgtctatgcatatgcataccacgtagactcacttctgttcactttttggtcctctgatctttgttatctaggttagaagaagtagttagggaaagtgaattgaaagttgtatgttacaggttgtaggccttaaaagatggcatatcatcggagaaatatatcctttcttctgagatgcctgtagtattattggtgtggggggcaagtcccccttctcctttccaactctacctctttaagtttcatccattatctcatttattgaaatgaacttcatttgggaatgagaaagttttggcatagctaggagcttttaatggaaatatgagagaagacatctctgacatatataatatgttcaatatgtttccatatattgcacaatctctgatgtgttacccaagattcataatgacagatgggctgagtagaagcaggagcactccccaagtgggaatgtctttagaaaccagcactc

SEQ ID NO: 64204 - DNA, 1082 bp, Bovine  19866881137553
  misc_feature (1)..(1): n is a, c, g, or t
naattagaattattgggtgggatgctaaaaatctgttagtcgctcagttgtgtccaactctttgtgaccccttggactatagtccatcaggctcctctatccatggaattctccaggcaacaatactggagtggatattcattcccttctccaggggatcttcctgatccagggatcaaacctgggtctcttgcattgcaggcagattctttaccctctgaaccaccaggtgggtcatatcttagaaatctaagaactcatctaattctggaatcatcccactcatgtcctttggagttccatcctgtgtctgagtaattctgcacttataaaaccctttccttaattggtactttgtgcagatgactcttaattttaaatgatttctctctatatctacccaatattcatctgtgtttcttccattgtacctttttcaagatacaatatacataatacactgaatccttttatccaacatcattctgggagttttaggacctgattcttgagatcgcttggatgtttttctctagatgaaagcttcttggatccttttactgtttttcatatcccttcactttcctggttgttttcttcctctgaaaatctttctctttgtgtctctatcccttaagtatattgattagaatgagtggatggatctcatcatgatcagaccttgaaaagtccacaatagagtgaacatttccttccatgagctcattccctctgtagtcaacacttgtgattttcctgtacttatcacatcaaagtgtcatgtttgtagttatttttttactggaaaattcccttctcattattttcaagttcttacagactgttgagtgaaagagcctgcctcagaccacatttaaaatcttacctcaagtacaggccatacagttcatggatacataaaccccaaatgaaaataaggaagaaaagggactctgtacatcattcagaagcaaaatgaaacatcaatgctttatgtgagtgtaagtgaaagttgacaggaaattcagggtagggttagggaagggccaaaaagccttatggtttatttttccaccttccag

SEQ ID NO: 64205 - DNA, 1796 bp, Bovine  19866881228533
  misc_feature (1)..(1): n is a, c, g, or t
ngttttcagaaatatatgtatcctatacctgttaggtattaggaatagtattaggtatagtatttctaggtatactatacctaggaaaagaaccaacattttcagtgtatccaaagggtttagtgctgaaagagaaacgtttcggtgtaaatcccttttagtgtacctaattcagtatgcatcttcattgtgctaacataatgaagaggttgacaataaaggccttagttaatttaaaatccacctgcaaagtatatttcattcataaaaacttttgtagaataaaagaagcattaatacagctcttcccaaatatccttatctgtaaaatgagtgtgttggattagttggtctctaaaatcttttccagcggggaattttggtaaacgattcttatagaggtgtaagaacaacttcaggacatttgtaccaacagctgccctttaaagttatatttgatcccacctccaggtgctgtatttactaacatattttgccttgatgctaaaactgtaaagactgaagttcattttcaggaagggcagggatggaaaagaggaacagccgaagaacgaaaaaagctacccagtgggagaaggaaattcttgatctgagacctaagcccatttccttcaacattaacatagaagaagcccagacaagcacctgcctttctattttaagaccagaaggactattctttagtctttctgccttcattaattgctcgtagtatcctttggtttgttttttttttcccccattgggttgacatcttcgagtttcatatattccccttttcacttgatttttgaatcatgttactatccccttcaaaagcctacagtagttatattaacatgccaccctcccccaattaaaccttaacacattcaaagcctcctgaaaattgccccacccactgtttcaaaccactcggaatgtataacctcttctcgaattaagcgagcctgctcttatcaggtccatgaatattctctcacccaagcttttcttctctgcacactctgcctctcacctcttgtacatttcagaaatctttcttttctttctcactctccctcctttctccttcattctttctctgcctttcccttccttcctccctgtctgccttttgtggttcctttcattctttctttcagtgggtaccatgtgtcctgctctgagctaggcactagaaatacaaagacacacacaaggaattaacattgactcctagccgttctctgttcactcctgcgttgcagaagtgtgctgtacccacagttattttattttgcatttagtctttagatttagttgaatgtgtccttaatgtcctgtgttcttttgttgttttcctccgtgtcttatttcagtaagttgcctgttggataaaacctgaagcttttcttacggagtgctttctccccaggcaaggagcatggcgctctctcacacactcccgaacaatgctgttgcttgactgattcccaaacaaggtgaacagtgagaaagctccatttttctcgtgatgcagcatttcactcatagttggaaatagcctggccctcaaagtatcgtaacattcctttatttgtagcaaagagtcaatgtgataaccttctgtgacgtgttctgttatttttttagtcgtctccgtgttcctttcagctggtcctatagtcccccttcctcaggaatgtcttcccagtgaaacaacacagactgcagaaacctgtcccgatggatgctaaagccaactgcgaagtggaaacaaagaacagcatcac

SEQ ID NO: 64206 - DNA, 2143 bp, Bovine  19866881228824
  misc_feature (1)..(1): n is a, c, g, or t
ntatcgagtgggtacactgagtacccacagacccaagatctaggccaacagtccattgtttgcccagaacaaattttccttccagtttctctccgagaccttgaaaaacaggagaatgtaggagtaagagcacttctctttaagttgagcactgaggttctagacctgctctgtcagcaggaacgtgtagatctggaggaagccaccaaaaatagctggcatatgctcaacactgattacgctggtggactccctgctcaccacattatgtgcatcaacttatttcttccccatggcctgttgagatagacactaatattatgcacgtttttcagataaagctaaataactcaaacctatgcttgatgctgcctccgttcatctgggttactgagagagaaactgagacacactgaacagtgaataatggggctttataagccactgagagctactcaaactcaggacgagtagagaaagcactgaagggtgtctaagtgtaattgatgctttgtgattacggtgaaaaataagaaataaagatcttataagatgaagatccagctcatacccctgaattatggaagattgagtggaagcagacccccagatcagaggtgaattataaaaacacagactaaggaatgcaatgtgtccagccccttctcattttgcaaaaaaggaaaacgaacatccaaagttgcagaacaccatatgcagaaccatacgtgatcaatgcacgttcctttcgtatccatacatattcggacactgtagataggctaggactcttgagttgatactatgctatttttcgacccaccttatagaaagagaataggaaagtgggaggataagaccagtgaatctgagtattcccttaacagagcacttgagtattttcagttgtttagtcactaagtcatgtccaactctttgcaatcccatggacggtagcctgccaggctcctctgtgcatgggacttcccaggcaagaatacgggagtacttcagaactgccattaaactctcaacatgttcctgacatctcttctcctcatgctgctgctgctgctaagtcgcttcagtcgtgtccgactctgtgcgaccccagagacgacagcccaccaggctcccccgtccctgggattctccaggcaagaacactggagtgggttgccatttccttctccacttctcctcataggcatttttaataaccaggtctgcctttacaaagtatccaacagtccacattcaacagaggcaacatataaaaatagaaacaacatgtatccacaaaactgagcttaataagaagcatccagatgtactagagagagcaaaggcttttgaataacacaggtgtgagtagaaattctaagtctaccactgactctttggtaactgaacaaactactcttctgagccttcagttttcttacttataaagtgaacaaaatgatgtcttatcactgaggagataaaatcatagccacagtgttcaataaatgttggcttctcttctattcattacagcctgctgatacaagacttggccaatttgccaactcacaatataactttacttctctacttttaagaagtggaaatgttgtctggtgtaactacacataactgcagatatatcaaagacacaaaccatgtttctcctctctcctatcacaagtatcaatgctccatctaggcaacttgaatgtgcttggcacatccttattttattttacattattttagtagtaacagattttaatttactttcctcagattacaacaggtcaaaatattgatatacctgagaaagtggaagacctacaaattaataagttatatctcattaatacatattaaaatctataggctgaaaacagaaaataagcccatctttactgaatgatagatttagtgtgtgtttactatggtaagattccctgcataattcttcagaagtgtagggacgatgatcaaatgtgataacagtaattaacatctgtttaacacactttgatgccagattctgtgaaacatagtaagagtttggatctgcaatcagatcaacatgggttcaaatttcaccccattaaatacttgggcaagtctcttctctttagatacagaattt

SEQ ID NO: 64207 - DNA, 1091 bp, Bovine  19866881234908
  misc_feature (1)..(1): n is a, c, g, or t
natgttctccgaacgaggtccgctgtgtggcctttgctccttctatctttcccagatgccttattctaccatccaaaagtacagccaggagcagcattcgcaccttgagaaataccacatctgaatgccacaaactaaggatgaaaaaatatttggcaggacatgtattataagtaacatgtcctaaacttcaaaacttctccaaacaatgtttattaaaagcaagcaacgagacaagtgatgtcttctgtcatgtcgacgtgctctgaatctgagtgttcctcccgttcacgtcaaacttcaaacatttaaaataataaacaggagagaaaaatagcccagctcattaaagcataagcaagaaagcaaggagaccagctcagcctttgcaaacaaatcagacataatctgatatgcttttgtttgagcctgggaattttttgttcacatagaggattaaaatattttaaaagattccttattaaatatgtatgtggacatatctgtacatgtataaaattcccaagttaatttaaatttatgggagaaattcaagggattgcaggtccaacaaccccaaaagaaaataaccctaaaaaacaatctctaaccacataaccagtctctgaagtttcacacaccacaaaaatgagatggttgcaatggtgatgaatgaaaataatgtttcacaaccacaatattccaaataaaagtacttaaaacaaagagcaaaatgtccacttccttattttttgagtcaaaatttgtttctgtcagaattgggtttttttttttgtaaatgtcatatatatagtatctataaaagggaggtacaaaatggattcttgtcaactctacaaataagcaacctgagtgttggttttcctttaagagtagaaacagtttataatttcacgttgtaaatctcactaggactgagtgctctcacaaggactgacaaagaaagaattcatgtcagaccaaaaggctgacggtcagtctcctacagcattcttctaacagattcgggccaaaatgaatatagaatcctaagctaaaccatccatcacattttcctagtctttcaatta

SEQ ID NO: 64208 - DNA, 1165 bp, Bovine  19866881241668
  misc_feature (1)..(1): n is a, c, g, or t
ncctgattattatccaatatagaaataataactcaaggcagcaggcttgcctttggaaacccaccgcagggtgtcggggtgtatgatgatgcccctcacctactggtattttcatggatgcctccagggcctgagtgcctggccataccgctggatgctgctccaacttcccccccccccatccgggccatggagcccccctcccatggaccagaattctccccaagttgtcgaggctgcaaaacacttgtctccattgatatcgaccagtggtgcattcagtaagaagaatggggacagggagagagccagctttgatgtctccaggggcaggaaatcactcagatgattcttccagggccacttggcagcaggtagagggtgtgacagctggtgggaaggtcggcaactgggatgtgaccgctgaaccatatcggggaactatgctgcccttgcaaacagaaaagttcattcctctagtctagtagagggtagggatgagggagaaagatcagagggcctggcacattaccacctgggaacaagagaattcaaaattgtccaacaatgacatgtcagaagctttcattactttgcaagaccaactggcccaagtcttcaagtcaatctaacaagaatgtatgactgtcaacacctaacaggtgggattcattgtggttaatccatgtaccttgaatgaggacttgaagcctctctttacccatctgttaaaatagcttataacatgtttctgtgagaaataataattactacatactcactatgtgccaaatatagtgtataacacttgacatgtattatcttttttctattcacaacaactctacgggatatttactcttaaatgccctttttccttattaagaaataggcagagagcactgaagtaacttatccagagtcatgcagctggtaaggaagccaagattcaaatccaatcagcccaaactctagagctctattagccaccacttaggaattaaatggaataatatataaagtattgattctggtaccagacacagcaatattactgatcattcgttttactttgccaacatcattattaaactccctctgttgctttgtccaaatgaaaaacagtatatgacaatgcttcaagaagtgaaagggctttatgaaa

SEQ ID NO: 64209 - DNA, 3609 bp, Bovine  19866881265101
  misc_feature (1)..(1): n is a, c, g, or t
nttatataggtgattatacagttccaagtttgtcaggacaaacactagtcttctccaagttggttttgtctcatgtcttcactgagcatttctggaaggcccagggaggactaagtaaaccaagtttttgttaattcagtcaatatatattgggtttgctaaagagttcctttgtgtttttacatatgatattgacatcttaacgaaattttgagccaacccaatattttctaactatttagtgcaagtttggactgcaaatagaataataccctacctcattactattctggtcccactatttcccctacatctcttgccctccaaatttaacttccccacagcacttgagtttctgttccgagagagagactgatctttgatgatctttaatagtttctttctctaatagttgttcttctaagttctattgaacgcttcctttaaatagcatttatcaaactttaattactgtaaacccctcagggatcttgttaaaatgcagattctgatttagggtgtctgaacagggcctgaaacgtggcattcctaccgactctcaagtgaggctgctgccattggtatgtggagcacacttaactgggtagcaaagttttacgtaatcaaatgtttctaaattccaagatggtcagacacttaggctgaaggaaaaacgtttggagacagcttcgcatctttagataagtacaacagatttcctctttaattgcaattgcacagtttatcttttacaaatgttttagtttctttcactaatatagaaccctaagatgccacattatgaaagttgcattttagaaacaaggaccttaaaaaaaattaaaaaaaagaaacaaggaccttgtgacattgagtttagtcctaagatcttcatatgaccctgattattcattcagtatacacatcctcaattagagcctgtaaagagaatccactgggggcatgagtgctggtaccaaacctggttttgccctactcaagtaatttaagcctcctgaacatcagtgcccagttacataaatccttggactagaactggtctattctgagggacttttcaaaggaatattctgcaattctgggactgtcattcaaaagtggtagatggtagtgactagaattttacttcttagcctctgtattctcctgccttataacataaaagtggaaatttccatttctacgtccgtactgtcaaagggacatgagcagaatagtaagaaacaatttgcagtagtggttatcacaccaacctgctaacacagaaagccacattaaggcaatggaaaaaaacagccgaataaaacagtaaatattaattcccttgttccttccatggtttgtagatcattaagataataaagaaaagtaaattaatttctgcctagttaatgtctgtgaacagggttaaaaacactgaatatcattttacagtagagattatctcagtggtaagcgagagggggctatgtcgggcatgtgaaattcaccacctccttccctggttcctgtttgagctcttcctaaacaaaaattatgtgcttcgtgctccaccgccaactgcagtatggagcacacgagagcttctgtggcccttctcaacccttttacatcagtcacagaactcccactgttctgtgctaatgcaaaatgcaataacgtgtagcatcaggacatctctgagtcaagaggttaacggaaaacacatctcccattgtgttcctgcagctctgatactgttaatggtgaaaacaccatggagacaaatagatctctctttattcaggaagctttgagtgaagagaaaatatatatgacatctttacaacatgagagccctctctatatggtgcattaaagaaggatgggggaggggagaggttcacgtaaccatcatgcttgataaagcttgaatcttgtctagggggagttttctgttgccttcattttcattctgttgctctaatattaatcaattcttccagttatggcagggggtggggggggagtgagaatttaatctttcaaggtacaaatttagagaaaggggactctttggataagtatagtggaagcctttatggagtatcttctaaaatgtgtcaggaagagatgtgtgatgacataactccctttctcatcctactcttacatatcttccctttctctgttgtgtgcttccgtgcttccagatagagattatggatcaatatacttgcgacagggaaccaaggcaaaaaaaaaacccccaaaacccacattataattactctgagatttttagttaaaaattacctgaaagtagactgaatgttttatatggccatataaagatcagtgtgatcttattatccattcacttgagaatgtcccttgggaaaatcttagtccgggttacttcttgttcctacagaactttagaaagaagtttgttctatagtttatgaattgcgatcagaagctaaaattgaggtgtctgttctttaggacctaaaagacttttcagtctgtagttaaaaattctgggacaagaatctattttgggagggtgtctgcacaggtttgctgctaagtcatttcagttgtgtccgactctgtgcgactccatagacggcagccaaccaggctccccgtccctgggattctccaggcaagaacacgggagtgggttgccattttcttctccagtgcatgaaagtgaaaagtgaaagtgaagttgctcagtcatgtcttgactcttagcgaccccatggactgcagcctaccaggctcctccatccatgggattttccaggcaacagtaccagagtggggtgccattgccttctccggcacaggtttagatgtaccaaataattatcaaaattttaatgttatgtatagtttttgagggagttccctagtggctcagatggtaaagaatctgcctgtagttcaggagacccaggttcaatccctgggtcctgggttaggaagatcccctggagaagggaatggctacccactccattattcttgcctggagaatcccatggacagagtaagcctggtgggatacagtccatggggttgcaaggaattggacacgactgagtgactaacacacacacagttttttaagcacttgaaagatatacattattgattaccacttgattcagttagatgactccactgggaggggacgagtaagtatttgcatccagcttttgcattggactggacactttcgggatgcgttttcaagccaggctgctgtccttcaatactagtactctaattgttgattcttttgtatcagggcagccaaatttcatgtataaaagttcatcaagtctgggaaacaagaaaagaactttcagaatggctcattgtttaatgaataagccgcaagtgttctgtggttgctgttttaaaatttgaggaaatgtatagaatccaaatcataacttgaatgccaaattggagcagatcaagctcagttgtgaggctgcagggttatagcaaactgttgttgttcagctgctaataagcaacttccaagcataaatgggacactcgtgttgtgtgttctgaatcctctaaagg

SEQ ID NO: 64210 - DNA, 863 bp, Bovine  19866881280300
  misc_feature (1)..(1): n is a, c, g, or t
nggagggtggtgggaaggggacagctctagctcagcccgctgcacttcctcctctccctcgccatcctctccctcaggttggcatccttctctttccttccccggccttatatagtcatgcggtttcacaagccccaacgcagaaagtctgccaacccctctaaccactccgctgccaaggcaatggtagaggcgagcttcaaactccgcatcggagccaggcaccgaatgtatctgttttctgcttctccggcaaggcgcccgaggtggcctgggggcccgggggcccttcccagttcatgccacaggcaccacatagatgcttacaggacactgggatggtgggggtgggggtggggggaggaacccttgggccgcggaagcaagcggtgcacttggacacctgcaggtgcgaacctccggccctctccctctccccgccgagcgccgctgcggctctttgtgtctgcggctctgcgctagactgggtggggtgggcaaaccggaagcggcaaatcagcgtctgggtcttgaaaaatgcctcgaagggtggacattttcattagaaaccctcgcacatttggagagaacaagtctgcctgcccagaggccttcccctcccgggcccccctctttcctcccccggcccactccctatcgcctagcctccccctcggcggtcatctggatctcgttgttcttgcatttccccagctgcctgtctgcatttgcaaccgtgcacgtgcgcagacacaccagtgctcaccgcacccaccctgcggcccccttactgaccacctcacacagctcacagattcgtaaggtaattccttcccggctccaacccccgtaacagaatagcc

SEQ ID NO: 64211 - DNA, 1067 bp, Bovine  19866881452453
  misc_feature (1)..(1): n is a, c, g, or t
nccctgtgctgggcagtgtgatctccttagccgaggacagaggacactgctgtggcaatggctctgcctaaatactctgctatcttcacctccaaagacaaaggtgaatgaagatggggctgtgacacggccatggttgtattcccagtacccagcacctggcacgtagcaggagctcaacaagtagtttttgaatgaacttttacactcacgtaaatgtaatttgttaaacccttttattttgtactgggggtatagctgatgaacaatgctgtgacagtttccggtgaatagcgaaaggactcagccacacacacacatgtatccattctcccccagtaagtgcagttttgatcgtaacttttggagagatctggattcatgtctaaagagccttgggaataatgcttagtaaaatgccacataaaagtagcatttaactaatggtgaatagcattctttttatccatgatgatactctgacagaggttccctctatacccacgtctgtgtttctgaaaaagaacaatttgatatatttcatctattctgaaagttccaaaggtgtgctgttggaagccagatgaatttcatctgaaatctcacctctctgggaattaggaggtaacgtcacgtgataaagccacatccaggatgacgtggtcgtgaaggactattctgagctacacacagggatagagatctcttacactttagagggtgtgggtgagtccagatctgagatcagcaactcagctgagatgccctcatttcagaaagagaggctgagaaggtagaaatgcttcatgactctttgacctaaagcctccagggtttcatagtatgtcttccggcaaaaagattggacaattcctttttttgcctaaggaaagaatatttaagtacgggtaagtggtgccccagggaggctagcttctctgctggtcttcatctgaggaatccctgtctctgaatagagggcaaggggcacaggcaagcattcaatctgtcctctgacagccatccatgcacattcagagtcttagacaccactgatcgggttacaa

SEQ ID NO: 64212 - DNA, 712 bp, Bovine  19866881452835
  misc_feature (1)..(1): n is a, c, g, or t
naccattcggtcaagggttcaggggcatcagcccttcccctctccctctttattctccagaaggagaggcactttggcatcatatgtttttgtaaggattaaatgagataaaagttgagagaaagctttatcaactagaaagctctttcaaatacaagagattattatcatcatcagagtccacttcgacctcccgcagtcccttttttcccataagagcctttcgcccctccaccctcatgtctttccccgggagtgagtcgggcctgcctcctgcctcaccatttcaccccggcctcggcccagccgcttcccagcagagcttggctgtcccttgaactttcagtgttggttcgatttcctccagtggtaccacatgctgctgtgcaaacagagcacgtggtccggccaaacaaaggaacatgtgtgtgtgttgcaaaccacccccctatcacgggagtgcgagctccgccaggagagggcccggcccgcgcgcgcgcgcgcgctataatttttcactgcagttgaaacaccccgtaagctctcaggaagcagcgggggtggggggagcggccgagagtaggggcttgtgtctctggctctttccatcaccgccctggaaatagcagcgatcgtgcacggccagaccggagcttcccccaagctgctaagatttcatttcacctccagcaggctgcttggggactcgctg

SEQ ID NO: 64213 - DNA, 1722 bp, Bovine  19866881459375
  misc_feature (1)..(1): n is a, c, g, or t
ncaaaggatcctggtgggctacagtcccatggggtcgctgagggttggacacgactaaacagctgaacattttcaaagtagggaaccactgataagcacacgctctatgacagttcacagagcctcacaactgacccacagggaaggtgttcttttgacgatgatgaaaagcagctgaggaagatcatttaccccttgccctttctgctctagtcccatcctctgtcatctgaagcccttcacacatattacttcctctgttttcaacaatcttcttccacttctacctttaacctgtaagaacttactcaccattcagggctcagcccagactgcccatctcccagaagtcttccctgcccctcctgactgtgctccacaaattccagaaccaccctattcatctctggtggcaactctgccttttaatattctgttcccttgtccagacccttccactggactataaactccttgaaggcagagaatgcatttctcctttattactagagctacaatgcagccatgtaatagcacatagaaggcactcagtaaatattcattgaattgcgagatcatgcaagtggattcaaaacagagaagactggtcacacggttcttccttttttcgtagggagccatgacactgaattgagtgccattctttcttgcacttaaatcacagtgtccacattctcaactggaattatcaagggctaggcattatggctaaatctatgttcattcaggtttcaaagccttcttctagaaaacttagcaacataaaaaacacgtttagatatgaacttgtcatccaagagcatttagaagggtgcaataaatcagttcaacaaacatttatcttgaaagaagtcctttttctctaagctttttacaactttgtacagctcaaaagaaatgtaatcccttatattgtccccttattggttcataaatcattaatatgctggttcaaataagctttataagataaaaaaaaaaaatcaccctctcactgaagttgttgaaagcagattttcctcttaaatatggaggtcattttttacagaagagaaacctaaatctattataatactgttgcctgtgaatctgaactatcaaatttgactaaatacattttcctattatttatctgtatttacaggatatacctaagattgcattcgaccattctaaaccactcagcaagtcagatatatcaaagctttcagacaatactgaaagttttagtgaagagttgaaagggagtccatgttttggtcatctacagcaacaatgagctgttgaacggaaaaattaaatcactagggctactcagggcagctcacacccaaaataagacctttattcacagccttataaataacctctgcatcacaagtactgccaggattgaataaagagattttaaaagaaggctgttgatagataataagctattatcctccaagacttggcaaactggctgttggccaaacttgtatttggatactcctggaaagatagaatatgacagttaattggtttatgtgagaaaagccaaatatcttaaaaacatagcccatgccagtaaagtgctgctggaagaatattttctcagaaagtcaacatgtcaacaacatcagccagatgtatgaatattatcttcaataatagctaatgagggatctcctctgggtcttctcaccttctacttactag

SEQ ID NO: 64214 - DNA, 757 bp, Bovine  19866881712595
  misc_feature (1)..(1): n is a, c, g, or t
nctttaggacaaattagccatatgttttaacagagcagaattgaatccagggctctgttttcagtccaaggtgtaatctgccattcgtttgcacacttattttaacaattgaaaagcttttcatatcattgcctccaaatatgtatgtagccttcaccgcattttctaatgaggctcttgtttaagtttgtttcttatttcttgaagcgaataaggatcctctaaggaacagaataaataaccatgcgatcattctctttggaccctacccccttgctttttccattaaggtaacattcccagtgttcattgtttgttggttctttaaagaagagcttcagcttttacatgagggttgaaagcacattagagaaataattccctttggatactatacagaaggagccacctgcaaaatgttgatgctgttattgaaatctcaagtggaatcagctttcaaaaaattagatattagatacatccgatataatttgcaatgtgtaattatactaatgtgcatatagttgtgtgttgctttacatgttgcctacttgagatttttttttttcccttgggcatttctcctcatttgaaatgattcctgagtagaatgtttttaaagtcagcttttattttaaagtcagcttttattttttaaattccttattaattaataaaagaagcaaagaactccatgttctcatgtaagaatgaatgtgtctgacctacatgttggaaattaaccgtcactaaaagg

SEQ ID NO: 64215 - DNA, 1887 bp, Bovine  19866880626636
  misc_feature (1)..(1): n is a, c, g, or t
ngctctgggagtctggctggctatccagagaggtcaggtgaagaagtgggttgcagaggtcgtagcaagggctggactgtgcagagtcctaagacagaggcagactttgatttgagcactgcagtcattgaccagccaccaaaaccctccctgaaacaaacaatggagctggcttggagtagaaggcttggtgtgggcaggaaccatggaaggagagcgacagaaaaaagtacccaaattctgtattgagaaggaggatatttccaaagatggtagttagatcagcctcccagaataaaatgccaacacagcatcccagctatgcatgtataagatactttagtcccctaagaagatacaagagagagattagaataaaccacccatctcgaagatacttcagtcccacaagaaggtacaagaagtgagagatcagaataaaccacctgtctcaatgccaggcacctggctccatggagtccatgttaccaaggcagggaactcagcagagccaccgccttctgttacccgacagcagtgtccatgcaattaaacagaccatcatctcctgatgggaatgtagagcgagaacgtgcaatggaggagctacttctcttagccatctttggttggtcaccaagtgtggcgggaagcaaaaacatccaagtagctttcctctctcagcagcccagacaggttgagaatcaatcaggtatggacacaatgaaagatacaaccaaagcacaggacaacgcctgcctccctgcagcttgccgtccagtcgagaagaccattcacagaagaatgtaaaccggttcttactcctacgcttaggcgtcaggtcttcacttcaaccgccacactcagattcagcaggaaccaaaaactcaaggactcccctgaggatggacttcctagaaggcaacaaggatgagtagcaggcagagaagaggaaaggcatttcagatgagggcaaagcaagcctgagaatcccatggttcctgagcaaagggtggccagccagaagcccagcgagggggagctgagagtcgtggagcggcatgggaggctgtagaccagatgctcaaagggaccaaggtgggactggggagcaagctcacagggcaccatcacaggcccctggcacggggaggggcacaggatgcgggtggtgccacagcagaggcctgccgtgccccagaagccctcccaccaggacacatggcactaaagcacatctggccttggagactggccaggcacttgctctgcgacctcctgcacagccgccccttcgcagacaagtggattcctcacaggagtatcagggtgagggggccttcttgccgcccactctgtcttggtcacttgccaagggtgctctgtcttgcttcctagctggatgccagagagacaagcaaagagtgagcagaaaccacaccctccccaagaatcccctactacagggcacacacaagcgggcacgtccccacaacacactccatctctcaccatctggctgagcaaactgctggtctctgagggaaaaaaaaggtaaaaaaagaaaggaaacctcttagagattatttgtttaatatctgaaaagtgagggagcagatgaagtatgcaagtttcatttagaaaatcattaaggaactattatagtaaaatgaggcttcccgtttccaaataaagctgaaacaatcacactgaacacactggcagagctggcggataaaggagcttggagaggagcaggaaggaaggaaggacagtaaaaataataactggagacgtcagggaattacaggccgcccccttcccccttcaggagagaggatcagttcgatcgatgagctgagagatccacagatcaacagcaacagt

SEQ ID NO: 64216 - DNA, 1657 bp, Bovine  19866880688133
  misc_feature (1)..(1): n is a, c, g, or t
nctatgcgaccccatagacggcagcccaccaggctcccccatccctgggaatctcttggcaagaacactggagtgggttgccatttccttctccaatgcatgaaagtgaaaagtgacagtgaagtcattcagtcatgtccaactcttcgcgaccccatgggagtggagcctaccaggctcctccgtccatgggattttctaggcaagagtactggagtggggtgctgtcgccttctccgaaatatgttttatatttttgtaaatcaatatgatggccccactggctataagttcatatacttgatatgtgaaaactctgagggaacgggtgccaggaaaacctcaattgtaacagatgagttattggaatctcagtgatgataactctgaagttaaaaattcgtgggggactaacttctacctgccttaccccatcccccatattgcaaaaattaacttcaggagctcaaccaagactgctattctaaatactggagaaaaatccccttttggttctggcaaagggaggggtataagagccaccttgaaataagtcagtgcactatgttcttcctaaatagcatggcatcaggagaaacaaactaaccacagcctaaactgctggggttttatcacagcctaactgatctgggaaaggaaatacccaactctagtttcactcaagctaacctatccccttgtcccacacctaaggataaggagaaaatggagaaacacttttgaagttcacaggccagaagcatagactaactgaaagactgagagctaatacttagactatggaattcttccccttttcccacacttctaaacaatgtcaccaaaggcctatttataatagttccttatacacagtacattgaatcttgctgttaaaaaaaaaaatataaggtataccaaaaagctgaaaatataatttgaagagacagaacagcatcagaatcagatatggcaggatgttggaattacagaccaaaaattttaaaacatacatgattcatatgctaagggctctcagagatagacagtgatagaataaaaaacaaagagatatcagctttgaaaattccctgagtatacaaaaccagtttagtcatacaaacaaagcttaatttagcttatttcacaaggctaacttgacttgggtcgtttctctcttatagctctggaaatcataagaaaaacttcagctctttcccacagttgaaggaaccactaacctatttcctattgtgatcacttaagaaaattctattataactaatcacaatgaaggataaacagtttctgccttctcagtgtatatacggctttataatgatatgcccctgagcctcatttcatgttcagtttgaatgattccagctcgtgaactgtttttggcatctgcaaagtaaactttcactaattacctactttggtgattcatcagttttgcctcttctatttttgaccttctaacaacagcatgcaagaagagaatggcaatgaagcaaagagataaaaatcctaaagaaaaaaacacgttagagattaaaaaaaaaaaaagtaatagaaataaagaaagtccttgacagacaggcttattagtagactaaaatagttgagggaaaaaagtctctaagctagagtatat

SEQ ID NO: 64217 - DNA, 2730 bp, Bovine  19866880733310
  misc_feature (1)..(1): n is a, c, g, or t
ngggttctccggcaagaatactggaatgggttgctatttcctattccaaaggatctttcccacctagggatcaaacctgtgtctcctgtatctgcagacggattccttaccactgggccacctggaaagcccctgtaacagccataggtacaaatgtgctgaagtggagaaaaatgtagaccatccatccaagatcggaactttaggctgggcttggaaccatgcaacctctcaaacggcaatttttcttacctaattcccactcccgatatttcagagaggcagagaaacaaagcaatttgtcccgtgtcataaagcaagcctgtgacagagccaggataagaattcggttttcctttcccctaattcattcttgttttccctaataccaagctgcccccacacgacaatgatgttcatcatttccactatgatgggagatggctggaggtggggactaggtgagtcctgctcactgctgtatctttatcccagggcccagcatcaatgtccagcacagaggagatgcttaagacgtcttctgaatgaatgagctttaacctcttttatcccaaatcaatctcagttcaattttcctcgccaatcccaagagagctaaacaccaccgatcccctcaaagcgttaacacttcatgcaaaagtattggggtgatggatggggagagctcagaggttctgtagggcagcaaaactcttctgcatgatacaatggtgaatacacatcattatacatttatcaaaacccagagaatttacaatgagagtgacccgttaacataaactttgcgggataatgatgtatcaacctgggttcatcaggggtaacaaatgcaccattctgatgaaggatgttgacagggagggagttgtgttggggtagggagtagacagtatataggatactctatgctttccactctattttgctataaatctaaaatcactcaaaaaaaaaacaaaaaaacgaaaatctattcataagcagcagcactggaggtcagtccagaaggagccagagggaccctggcaccgctagggtgaccggtgccaaaggaaggcgtggctgggcagcaggtgacagccagggctgccattccctatgccacagcaagcagctccaacagagccgagagccctgggcttggaaaataaaactctatattaggcatcaaacatgccttgatagtaatagcacaaaacgagctcaagagtaagtctatgctggagcactgactgtacaaacaggagcacatgactctccctccccaagtgcccatgacgtcctacagccgtcccgagctcaggctttctcgggttcaattccctggcacaccacgtgaaacgctataccaatcacccctgatatttataaaagtcaaaagctattatgctttcaatgggggaggtcacaccaatctaagtggagcgcacgtgtccatctgatgacccccacctctccccggccctccagcctgggttggggtgagaggctcgttctgccttttttccatgtcaagttttggaaagaagaagttctttctcatctgctggcccttctccctttccctccctcatcctctttgggaccaggggaacagagagactgcccttgggaggaggagccagaacagttgctggttttcctactgcaggaggacaggagccagccgccctgacagggctcctccatgcccagcaccacccctcgtgccaggcccagggcaggagcgggggccagaaggctggcagccacccccagggaaggaatgtaactgctcaccctctatgattctctgccccgcctgctcatccaccaccgaaagtcctccaaacaaggacttcattttcttctctggagttcagggccagagacagtccctgcagctctttccaagcatccttaatatatcaggagggacagaggggccagttcaagcaggcagccgacaacaccaaggtgggggcacagctctctgcacgatcaaagggtgtgcatgtgtgtgcgcgcgtgtgtttctgtgctgtcactgccttctcctcccaaagccacgacaaggtgcctctgagcctccttcacactgaggaggagagggccccagggagggcgcctccggcgcctgctccgtgctcccggggcgggcaggtcctgcagcaccgctgcccttggccgccgggtgcgtcagctgttctgggccgcacgaccctcctgaggctgacacggaggagctgagaaggagcatctcagcatttgcatccgcttgaatggctttctctgtgacgcaggaaggtggaaatgaagcaagtttttctaggccagcaaaataaagtccttattttgtagtcaagagtggagagtactttggcctggaagtaagaactcgtgggtcctaattctggtttggcttatttgttctcaactgacccccctgtgcaaatataggcctctgagccctagttttttaggctgttgaatgggcagagctgaggtcccggctctgcacattaggtatgatgcccaggcccgcacggggaggagaagcagcattaaaacacaggctttagggtgcaggagcccgaagcacacgttctagccatcctggacaggtcatccttaacttctctgagttttaattttctctaggaaagaagagggaaggaaaatgtctatgttttaggatggtaataaggacttaataaaattatatcttca

SEQ ID NO: 64218 - DNA, 1668 bp, Bovine  19866880742568
  misc_feature (1)..(1): n is a, c, g, or t
ntgcgcatgagcatgtgggtgtagatacctggtccccggccactttggggagaggttatcccccagctctcgccatggctcagacccaggcctgccatccccccaccccgccccagcccctgcccctcaagtgggctggcgggagggcaggctcttctctgggctgtgtttgctctccaggggggcgtctcagtgaaagtgaactcactcatttaaacctgactctgcagccttgcagccccctgcagcgctaattaccctgtagctctaaactgattgctgtacactacgcttaagcccttctttatttatttactgactacattaatagcaaagccgctgctttctgcagctcatgactgtacccggctggctgcaccccgttcctctgccgctgcctctcctggaggttgggggataggggtaggggttggtggtgcagagatacaccctggaaagcccaccctctcccagagatcccggggccacagtgtgaaagtcacggccttccccctcatactccctgacccaagcggggggctgcttctcttgttctggttcttcaaaagagcaggagcacccaacaccctgcatccccagggggatctgctatttgggggactcttggaagcctccctttcttcatagctcctgtgaggtgctgagcgctggctgcagtatttacaaatcggtaaactgagactatgactcgtggtgatggccggtgaaggtgaggctgggcgctgagatctgtcattccatcagctccgtctcttctctccgccaaggccacctgtccaggtgacacccctccgactcctggcccgatcaacccaggttggaccatttccatttagtgataagttttcacagcttccactcctgtgttgattcaaagcctttatctcccagctttttctgcctcattcacatacctgcccagaatttgctggaaacctgggccctagagcctttgcttcactctcagtagcctatcccagggcagacctaaggccagccttagccagaggacaacgtccctctgccactcacacctgggcaggtctggagagcgaggccagctgtgggctcctgcagggtggtgtcaccaggctgcctggcactgtctgcttcaccgaatgccctcaggccccatgaggcagagctgagccctggccttggggcctggcagcaactgaagtccagatgggtcccatcagggtgcagcatatggacccatggaatcgagcacccagctccactctgactgatgtgtggtggctgctattctgggctccccccaaggaacaggggcaactgagtcctggctgaaagaacccagtgtccagagtcaagaggacctaggtctgaggccagctctgccatttgtcatgtgacctcgaccgtaactccaagccactctgaggttctatgtcctcagctgtaaaatggggtacagaaatgcttgccctgtctaccttcaggacactgccaactgaagcaaggcatgtgaatcagctttctaaacaccatggtgctataaaatgaaacttataaattagtgggagagagggcaggctcggggccagcctgagctgggggaggggcagtggtgctaatggcctaagcattcatttccagagctggagccctgtagccaggacccag

SEQ ID NO: 64219 - DNA, 2868 bp, Bovine  19866880905056
  misc_feature (1)..(1): n is a, c, g, or t
nggctcaccctttcagctcctccacttaccctggaggacttctgtccccgtgggtgtgacccttccttgtccccgccctccaggatcttggtgggctccagctggtgctcagggacaacacacttacgcttgggctgggctcaggcttcgttgtcacacttcagttttctgttttgctacagctaagactttgaggagataaacagagatcactttacaccttttatattatgacaaatacatattgcaaaacactgctgcttccaaaatgtttgggttgcagagcagtcaggaattaacagctctgcagctccccaagatgcctgtacttcatttacacatcagaattttttttacactgttcagtaaaataaaaagcgagaaaacacatatacacacacgtacacatgcgcgcccagcgcaccacttgggttctatatcaggaatgtcttaaattagtaagtagttctttaaaagtccagatgaactgataaataccattaatggcttaatttatactccgggtttgaaatttgacacacggacagtatcttggctcaggaaacacaagtggttttgtgccagaggttttaatgaccgatcagtaatataaattgctgcatcactgaacagaaatagcttccctgtgtcacttgatctggaaacttctctggccaggcagcagttaataaatttaaaaataattaccctcttcattcaaagtcaaactaattaggagtgggttttacaaatcataatgttgtccgagccactgtacatccccgtttgggacgtgaacaggcctgggggcaacagatgggatcgggtggcattaattagagggcaggggagatacctcagctgctgagctaaaggcgagggggctggggcagtctgcagcaggccctgtgggggaggggggagatctcagtgcggcagccttggaattgagctgaaggaaacttcagctcttttaattcatatgtaggagactcagaggcttcacaggtggcattagtggtacagaactcgcctgccaacgcagaagacacagaagacgcagcttcagtccctggattgagaagatctcctggaggagggcatggcaacccactccagtattcttgcctgaaaagtcccatggacagaggagcctggtgggctgcagtccatagggtcgcacagagtcggacatgactgaagtgacttaacacatctgcatgtaggggactcagaacagctccctgtgtacgatctgaacataagagggatggggccaatgctggtgtttgggggccaggccagagagcctgtgagaacccaaagcaggaaaggcagatgtgcagatggctacccagggaggatgagctctcgagggctttattcaccaggcaagctggggccctgatagcgcggttcaggtttgtcttgcaggtttcaaggaagcgggacccttggaacccaaagtcttgagtgtgacattcagggtattcggagcacttgggacctggtgtcagaggtctagattcaagtcctatctcgtcccgtcacttccacgttttatgagcttgggcaggttgcttaactttccctaagcccatttcctccttggaaatgtgacagcaacgatgctgtcgtacaagggatgttgtgaggatttaatttgatgatccgtggaaagcactcagcataggccttgcatggagtaagcgctcagtcagtggtgatggtggttactaacactgcaccatcgtggtcttcgccatgcccttggagggtatcctttcccctgactaggtaggtgagaggagaaggggcaggctgatgtggtaagaaaggaataagaatggggtgcagctgctttgctgagctgatgggatctttgaggatccctgatgcatcctttggtcaagaggatgtttccagtgtacctgtagagccatcagcccctgctgtatgtacagcggggagaggtgagggcataatggagttgtgcatgtggaacagcctctcagaacagatttcgtggattttatttaaggccctagttcctagaatgcccgaagcttcccagggggactgccctcttctgatgtttaaaccgatgacatatccaactaggccggacaggctgcagagctggggttagcacagagcaaggtcttgtgttcccccttccaggagcttgagtcctccactggtgtcctggcccatgtctgtggccattaggaacctgggtattctggaaatataagtcagacctgggtcatcccactttatgccctcgtagtgccctggtaaggaaaagagacagaaagtcattcctgagcttaggagttccggggctgggaagcttcatggacgccttagagcccaggacacttgatctccagacttgctccaaagcagttccactctgtcttccagcccacgccctgcccccccaggttggccagcctagtgacttgtgttcgccacataccaagtagcctgtgcggctgatttgtcccatccttccttcattcatttatccactaagttttgaagtacctactgtgtgcaaggggcggtccctgccttcctgaaggctacagtgtgttgtggagcaaatgaacaagtagggtgaatttgctttggttacagataatatcgtcttcccaggtggcgctagtggtaaaacagacaaacaaacaaacaaacaaacaaaaaataaacctgcctgccaatgcaggagacataggagatgtgggttcagtccctggctcaggaagatcccctggaggagggcgtgacagcccactccagtactcttgtctggagaatcccaggacagaggagccggcagactacagtccataggtcgcgaag

SEQ ID NO: 64220 - DNA, 660 bp, Bovine  19866880925047
  misc_feature (1)..(1): n is a, c, g, or t
ntaaccatcctattttgattggaattcttgattggaatttttttgcttgccagggaaaggagaaaaaaaaaagaaacccactaagttctaaacttttcattaggtagttgggataagaagtcttctggggtagtcagattagagcttggtggctctcactgactattacaagctaattgagtgccaggagctcactggcggttgcaatgagcattttgctggagtaattatgcaaaggccacggtcgtcggtaacaaggtaactccaggtaaggagagaactccctgaaacttttgatttgctgtaatcctcctcattttatttcttcattaagatgagcccaggagagatagaggcccggagacgagctcttctgagaggttgctgctcactggggatttctgcgtgaatgtccctgccctgatggtgtggtcactttgtgagggcctgttaggagccatcccgcacaactggcccatgatgggccgggtgtacgtggattgagatttggggtccagagtcagatgctctgggatacaggctggagaggaatgagggcaagcactgggagcctggggacagctgaccagggtcagggaacctcacaggccagcatcttgtttgctgacgtgtgcgctgagaacatgcctgaccacaggt

SEQ ID NO: 64221 - DNA, 867 bp, Bovine  19866880954106
  misc_feature (1)..(1): n is a, c, g, or t
ntgggagagccctcggtgggggcatttgggagctcagttgggtgggtgatcacatcttggaggtggggccaggctggctctggggccatgggttatccctgacttgagattttcacaggtgttcagccccttcccccagggtccacctgcacgattttagcccaggaccccttttcctaatgcagtgtcactcttaacaataataataataataaagtgtcacctcccctttgtttcagcgggtgccaaagcctttgtctgcgatcagtgtggtgcccagttctcgaaggaggaagccctggagacgcacaggcagacccatactggtgagtgagtgaccccatcccccagggtctcccttgtggtggtgcatggacgtgagtatcttggcccttgtttccctggggagctgtgagcggggtggtttgtgccatcttcagctacccttgctggtggagctggcagggcaggaacttataagtgtggctttgccccagaagaacagctgccctggttcaggccaaggtctctgtctctaataggccacttggagcccatcttcatggagatgatggtactttcagaggctttagaaagtcagtgatgttgtctaactctgaagcccttgtgcggcccagtgggctgtccctccgtctgcaagagtctagtcattgtctaaaagaaagcagtctgtccacaggcgtgcgtgtgaacagtattatccaacagtgatactgctgtgatctcaaaccattgatttcatagcatcagcgtcatctcatcatggtacttggcgtcatcttcatcattgtagctcatgcttactgagcattcacaacatgccaggccctgttcttggtgctttac

SEQ ID NO: 64222 - DNA, 1508 bp, Bovine  19866881197147
  misc_feature (1)..(1): n is a, c, g, or t
nccgtattagaatctgaacctcgttgtcagtatactgcctttggggtggatgactctgctgtgtgtgtatatgcgtgcatggatgtacttgtgtgtgtgcatatatatgcacacgcatacgtctctctgtaaagctagagaggactttctggagaaggaatgcagggatgtttgaggatggccctgggtccctgtcatccctcatcactctgtaatcagctgctgtccatactggtttacacacagagtttgaatgaaggataaattcccatttctcatgctcatgggttctctgtccctcagaggagctgtgaaggaagagctgggtttacagtttgccagcctcttggctctatgatccagaggcattcagactcttattgacaatggccttaaaataagagcttttaataaaataaaaaaggtgacatggggccacacagtcttgtcacctatggctaaacagatctgaggttgctggaccagtgcagggagtctcccaagccagtgagataacatgcttctgcagagaccagatgatgaatatatttttaaacttggaacccagaaccactgattatttctgaattaggaatcgcaaaacatacgaataatctcaacagggtttctgcagatgtattctgcctttaaggtcacttatttgggggagatggttggggctgacgggggagtgaggtctctggcttggttctgtctgtgagtcccaggaatccatgtcatgcgtggtcagtttcccagtcactatgagtgttaggcgaggcacattgctgcagggtcaggtagcgcggggaagcacacagccttctttattttttaatacatcagtgtcaccagcgcttacagcagagttgggagaaggtgggctctggcggccgagtgttcgtggctgtgatgattgaggaggcagcagcctgcaacagaattctcaggcttgtcccccaatgcctctcccctccctcccagcatctctcccccagccttcgaccaaacaaggtccggaactgaggtgttctggaatgccgcccttgctaagctctgggattagggccggtcatttgggaaaggagatggagggagaggaaagaatacccaaacattaaccccttgagcccacagcgctgagaggcctcaccatttcagccacgggcaaatctgcgtgtcttggccacatccctgaaacctgagatgcgtgcaccagaaggagacagttaagccaagccaggctgatgaaaatctctctgtccttaatgactctgccgggcacacctgctccagcctctcacttgctctcattgtcagatggacccaggtattgaatgaccgcccccgtgcagagtgcagctcgaggggccgtggtggaggggagtcatgagctagagggaggctgtgtctcttgtcctcagggagcttgcgcgtgtctgggaggcgtgttcaggctcatccagcacccagggggtggccaaggggaggggactgcagggcactaa

SEQ ID NO: 64223 - DNA, 1533 bp, Bovine  19866881245165
  misc_feature (1)..(1): n is a, c, g, or t
nccacccacccgccccaaacccctcctttaaagaaggcccctccccagccctgcagcccaggcctgattgcttccagagttggagagacagcttagcaggctcttgtttcttgccgatgtaccttattagtagcacctggcatcataacccgctaatgggaaccagcgctctcctcctgcgtggccagtgacaagtagccctgtcagccggagctcgccgtgcgaggaagttcctattagctttatggtcaggagaacttgtcctgttcaggaaatgaatgttgccgctaaaggtcctcagccctgaccctggcggcgtaacctgtgcgggctggggagaccccgctcaggatgcttgggatttcagcccctctctggttcttgtcatatgtaaagagggaatcattgtggtatgttgcagccttgaacttttgatttatgcagcgagggcgacttaaccgtttccatgcctgggcggccgtgtggtgacaagctcagggtgtgcgcctaggtgttggggggcggaggacagagccctcgtgctggccagcggagtggctgctagaacgtcagaaggacactttgcttgcttttccttcccgggacatctggatgttcaggggtgcttgttgcctgtggaagggtgggaacctgggatgctttgcgtctgcgattgaacctgggtttgaatccattctctgcctgtttggagctccgcgatagatagccagccacccgcttcctcatctgcaccaggaagttaatgatgtcaatttcatgcatgctgccatgatgacgttcctaggatggtacacacgggacccccggggccaggcacgtggcctggtctcagggcacagtgttgggaggggacgtgcgtgttcccttttttgcttatcgtaacatggtttgaaaaacgggagagaatggcagagcactttttttgagtatcaagaccatttctctccctcatcacaggctaaaatctttatggaaagactgcttaggtggcttctccttctgtctttttcaacctgtgagtaacatttgtaaatgtgacatttgtggagaacagcagcgtttgacctcattctcgaggtgaactctggcctgactctttgagaagaggcgtttgtgagttgtctggcgaaaggatagatcgtcacttttgctgcggccgctgccttgctaaaggcccctggtgacaaaggggtgaactgcaacagggtcgccaggaaaggatgggcctggtgggagagggagggctgggacgggatgcctctggaactgcgaaaacagtcctgtccctccgtctctggcatttatggcatcgttgacagtagttcaaggaaaaataaaaataagttgttaccgactgtgtggttgggtgcaaagaatgaaggacaggcgtggtcaacggtggcggcaactgatgaccacggtaactctctgttacccagagttttggggagtggggccctgggtcgttgcagggcacacacactactgggaggacgttcttactcccctcaa

SEQ ID NO: 64224 - DNA, 1929 bp, Bovine  19866881327347
  misc_feature (1)..(1): n is a, c, g, or t
ncagcatgtgggatcttccagaccagggatcaaaccagtgtcccctgcattggcaggcagattcttaacccctggaccaccagggaggtccctagactgtcttaaggagcctagaaattctctttaggtgatggagagtcctgggacacctttaaaaggaatgctgcaacatcagatcagtttcctagaggccacgttggtggttgtgtgagatgcgctggggaagatgtgctgtgttcaggacgcctcttgtaggaatcctggtggtgatgctggtggctgggtccaggctgtgcctttctggtaggagaaggaagggacatgaatggcaaggtcttaggtcctaaaacattagccagattgggatggagggtgtgggggtcaaggggcctcgggatgacatccaggcatatttagtctgagtgacagcgtgtttgacagtgctggcagttgagacagagatccaggaacgggggcgggattgggagcagaagatgtgggtttcaggcttggacatgctgagtctagggtgcctgtggagcatgctggggcactcggatttatgggttttgtgctcagaggtctgggcgagaggtgtggttgttagtttctgagggccagtgagaccaggaaaggagagttcactgggagagaccatggggcgcggggtgcatcgtgagctgaacactgcagggccaaaagctgagcaaggcctcagccctcatcagcctcagactttgcagaaagaagcacgggcctggggtgcagagggctgtctctggagggctggccccaggtgtggcctgtgtagagacacccacagaggagactgaggaggaggtccagggtcccagcggctggtgttcttgaacccctgggagctcctttgacctgtgccctggtctggggcaggagagaagacaggctgaaggaattatttcagaactgctggggccttaaggggagtcagatctcccctccttttctgggttggaacagtcagtcctctgggccattctagacggttcgaatacctgaccctgccctgcggcatggcccttcctgggagtctcatccagtgagcccttaagctggtcccgcttcccacggccccatctttttgcatgtgtgtctcttttttgaggtttatggtgctaggttatgttgcatattctggaaggaatgtaagcacccccgcttccttccagaggaagctgggatcatggccccatttgggtctgaccttctcttaaaccccatcccccactttcccgctctcaccctgatccccaaatgaacacttctctgggcatgtgggtcccactctccctgatgtccttctctggtggcttggcattttgggaccggctgctagagtgattgacataaagccaatctataaataaagtctttttctcttctcataaagactttgtggttgagtttgccttcaaggtcaagatcagacctttctaaataaacacatatcaaaggatcattagcagagcagcactgttaaattgagatattaacttctgtcaactgcttgtttcttttttgttctgtaactcatgactgcagtaggtttttattattttgtccttaggcagtagcatctggcttctgtagagactgtaaaaattaaaaagcaacacaaatcattgtgggagaaaagcagtaaatccaatgataagaatttaaaattaaaatgtttcagcgcttttatattctgcaaaacatgaaatgaatgagtttgctgcctgttgccataaacctaacccagctaatcgtccgcttgagttttttcctgtctcctttgctcatcaccatcaattctgccttggtacaaggcgagacatcaagtgaaagccatgcttgtgtgtgtgtgtgtgtgtgtgtgtgtgttgtgtgtgtgtgtgtgtgtgtgga

SEQ ID NO: 64225 - DNA, 1717 bp, Bovine  19866881331916
  misc_feature (1)..(1): n is a, c, g, or t
naatctagcccatcacgagtcagtgttgctgggagtcaggaagaatggattgagtttggacatacattctcctcgtttggacatatattttcctgaagcgattctctttaggctttaggggccccagtgaatcctgacttccgtctcttgggaaggttaaaggaactcgtgtgttaaaatcctgtgctggtgcccagcacatcctccagtgtggcaagtccccttttctgacatccttacttgtcctcaacaccacgaggctggagggaggaatatttgacttgcctttccatgggaaccaccactggctatctgtcagtcccattcaccttgggattgtccgtcagacctggatcttttgtgacctggctgtgcagggggtcggagaggggggcaacgctcagaccctctccttctctctcctcgctttctatattatttatagtaaaacatattaggaccgagtgttaaagaggaaggatgagtcattgcattgaaaccattgatgacataaataaaagcaaaatgcttactatgtgttttgtgcagtatttaaggccaggtggtgctaatttgaatgctccccgactgggtctgtgaaagtatacatatgtgggaaaaaattcaggtttaaccagagggaagttggttattgaaaatctatttcggtatctgctttctcccttttatttacttccgatccatattcaaatcctggttgtcatccttcctaatgagagagactggcttattctctcgctaggattggtttatttctggaaggttgaggaatggtgcaaggggggttctgtgtgcccccagtcttcacccttcttctcacctgctgtggagggaaagctctcagaaccctcacctgcctcccagctgtgggttctcaaggtgaccagtaatcatagaccgatagaccgggaaggacccatacattgtttatttcggcatgctcatttaggatgtaaaatatggaggttcaaaagaggtgctgtgattcactcaagatcacgtagcacattagtaaggactagaatccatatccctgcctactttaattccttcttcacaaacctccctgtgactgccggggtctgctccctgcttctacccccaaggaggagttaaagtagggtaagaatagaatctgacttaagggcagtttcagatctttggctgtgtggcgtggatttttgccatggtgactggctttgtgggggtgcttattaacctctttcccgctcaggccgagtggactagtgtgcactgaattctttaggtttgcaggtggtgcactgctttggggttttgagtattggtaagactcaatatttgagtattgagtattggacttgcccttgaggagcttataacttgagcagttgagttaaaatactgcaaatgtgtatgagtaggttgataactaggagagaaagtagaaaatggaaagattatggcagatatacagggaaaaaaaaaacacaaggcaattcggagatgaaatgccttccacctggagggattcatttttaattaaaaaaattttttttgttgttgcacacttactgtgtgaggggccccagattaggcccctggaattcagtggtgcacaagacaagagggtctggccttgtggggctttctggatgggggagaaatgtagctagtgttctttggaaaaactgtggggttgcaatggtggtaaatg

SEQ ID NO: 64226 - DNA, 1156 bp, Bovine  19866882000854
  misc_feature (1)..(1): n is a, c, g, or t
ncactttctgccataagggtggtgtcatctgcatatctgaggttattgatatttctcccgggcttgtgccaggagaaatcttgattccagcttatgcttcttctagcccagtgtttctcatgatgtattctgcatgtaagttagggttttggaattcagacaaagagttagggttttggagttcagactgatcattctggtaggtcctctagactcgcccaccaaagcaggaagacccggctccagggcaaatctgtaactggctttatgattaaaaggggggaatgtacaatttaacccttggctaactagacgacatgccggagctgcagttaatctaaacactgtattttaaacctagagagcaacatttctagaagacccaggatcagtctgctcccaggactgctaacttgggcccccttggagaagggcgtctgatccctgctaggctgcacagggctctggatgcttctcctttctgacccttcatccctccttctccctactcatgtctcatcaactctctcaccctcatctccacttgctacctgggaatcccacagtctggccacagatctctaaactggttcaaagtctccctcctcagaagcgcttattactctaaataatgaatttcccagtcctaattaatgcaaagaaagggatgatatacatttctctgttgctttaacttacagctagtaagacactttgagggaagagctagctaaagggtcagataagctaaaatcaatataagccaccacctcgaatcttttaaatcaccacctgccctcccctgactatccctgagccagacccctgcagtgggcacacagcaaccaccaagcctgcaaatgaccatccgttctagctaatattcagagagatcatctcccatccaacccctagttcctgctacccccagtgaccttccctacaaaaagaaaaatcactgaagtctctgggagcaatcagacagccaagaacaagggaaataacctcagggcagccagaggaaagaacagaaggcagacactcggaagacccattaatagaagtataacatctcaaacaacggaggtgagtgtctggttcttcacctgctcatgtcagtgcatacaacccttctgatgtctgcagtgatataaaa

SEQ ID NO: 64227 - DNA, 1486 bp, Bovine  19866880464686
  misc_feature (1)..(1): n is a, c, g, or t
ncgggtggttgatacagcctaagtgattctcccatgtggctgtttctaggtacatcttttaaaataagttgtgcttaaattagcaacgctttacttttaatattcctctctcgaagtagcaagcatagtttcaatcaggagcctgattaatatgcaaaaaatgatttgttttgatttcagtctagtgggctttttttttttttttcttcaccaggcaacttctttatcaaattcctctgcttttaaaggatgagaagaaatgtatgtccttaaagtcagagggcatggtttccttgaaattggaaatagaaggctctctggaggctggtctgaaatcttaacagcataactttgccaacagcaaaacatctcttcataattttatgactaccttcaggtatcagctccatgatgatgtcatgcaaaaccttgttggattttgcaaaaaaactgcagccgttggaagttgcaattgacatagttgttccatcaaagtgtattatattttgttgcttattgtatgaccttgggcaagttacttaaatctctgtttattatccttaaagtgaagataatacctacctgttgggattttgtgcaatgtaagtttataatcctttatccaaaaacttgatgaatttccgaattcataattttttggatttttttaggaaggcaattcagcatgtggatcatattacttaacactcccagtggagccttgggaagcaccctgtcatcaaacacattaatatttctccagccaaacccatgaatattcatatagagtagcataaagactaaaaatagcctctcattagtccagggcaaggtttgtaaccaagtgagttataaacagatctctctctttccagagcccttcggactgggggcttggcaatcagaggctgtggtcctgtgatgagacagtctctgtgtctatctactgatttcagctggctccaataatgactcagtgtggtggagtgatgcacgtggaaaggtctgttcccagggtggttcggtttccctccctgcttgtgatgtgagtgggctcttgtgaattttcctttcttctttgacattttaaatcctaatttgcttctcccagggatctgatttcaggcacaactgttttgacgcaaataggcttgaccaaaggttctagagtgggaaaaacgataatgtcattacttaattggtacatcattaagaaaccgaattgtctaaaagttggtaggaagtccaaagaaattccccaggtggcaagtttcaggatgttcagaaggaaacacacagcaagaatttgtcagtgtacacaaaaggctgaaagcccatggcagatcctcaaaactgccatggtactgtctctgctctcccaccctcagcaagccctgcttaactgtgccatgactatgtttaatttttacttactatgtcaaagcatataatatataatacttatgataataaacataagataaat

SEQ ID NO: 64228 - DNA, 1697 bp, Bovine  19866880483329
  misc_feature (1)..(1): n is a, c, g, or t
nggaaaggaaatcaaaatcacaatgagatattacttcacaccctctagtatgattagaatcaaaaaggcagagaaatgatgacaagggtgtggaaaaactggagccctcacatactgctggtggaaatgcaaaatggtttagctgccttgtaaaacagtctggcagttcctcaaaaggttaaatataaggttgccatataacccattaaccccactcctagctatataccctggtgacatgaaaacatatgtctacacaaaacttgtggacaaatgttcaaagccacattatgcatcatagccaagaagtggacccaacccaaatgtctatcaacaaacaaaatgtggtataaccatacaataggctattattcagcagtaaaaaggaataaggtactaacgtactatatgacatggatgaatcttgaagacatgctaaatgaaagaagccagacacaaaagatcacatattgtacaattccatttttatgaaatgtccaaaacaggcatatccatagagacagaaagtggattggtggttgccaggggcagcggtggttggaagaaatgaggaataactcctaatggcattggggcttcttttgggcataatgaaatgtcctaaaatcaattatggtgatggtgcatatgtttgaatatgttaaaaaacaactctgtgtttttaatgggttaattgtgtggtgtgcaaactatcattaacattaaaataaagctgttattttttttaaacccattacaataaaactaaaaagtctaagggaacaaagttgttctatatttcaaaaatctttttgggtgaatttgttgacaattatatctacacaataagatattcttccaagtgcatttcatacaagcagggccactgggaatggttgggcaggttgtacacttaacaaagtattaatattactacttagcagtatgcagcaaccatgcccaaggggaactccatctcagactgtgtgctttctagagtgggagagtacagctgacctgtgcctttgacccttttttgtttcaacaatcaaacagtaattattcttcattttcactcattattccttatttcacatggcccaactcacctaaatcctccaaacaattcccttgaaatgcatggcacacaaaagaaggccagagccaggaacagaacgggtgtgaaacctcagccttccggctggttggatttgaaacttttctatctacttcctgagtctgtactgaccatctgaggactccatctgtctcctcctaggccctgcaaccctgggttatgattcttgctaacaattgattgccatgattccatttcaacaacaatgatctggagttttactttgagtgtttaagaatccttcattatctcctaatggcataatagcaaacacactttaaccactaaagaaaagtgaacagcttggtattattttgagaataaaatgagttgacatatgtgaaaaaaaaacttacaggtttatagagaaccaatgatttgatagaaataattagggagtctacagtaaaacagctgaaggtatgtgttatcaggttaattattttactgccctgggccctcagtttatccatttgtaaagtaggcaaaatggcagtaatcttcccataaagttgtgagtacccaatgaattaatacatataaagaactttagaaaaat

SEQ ID NO: 64229 - DNA, 768 bp, Bovine  19866880521777
  misc_feature (1)..(1): n is a, c, g, or t
ntgcaaaatcccttctctcaaatactattagcttgatttttgtttgaaagaggggaaaggctgaaaattccaccctgcttggctctgtgccaaacgaacagatctgaaaatgctactaggtattttgcacgcccctctgcaattattcacctttgttgtcttattaagagactctctctttccctagatgtaatgagagcacctctggattcccagaccctcacgcttcataaatatccattaggaaggagccactggcccacagtcaagcaactaagtaccttgaatgcaactcagttattctgaaggtccttccagtatcttcttggtccagtcagcatttcccctatctttgcagcaattattttcttcattatcatgatctttccttgtcttttgttcttagccaggtaagtaaaataacattcctctatcctttattagaatttccagttctgctttcatgtctcttctggcttgttatctatttggaaaactcctttaaatgaattactgaataacatgaaacagtgattaaaacaaaaggaaacaaaatatggagcaccacgcacagcagagacctaggtgagcacatatgagttcaataccactgttcttagcccttcctccatgtcaaactctcagtggttgtgtaatcttccttcagaggccactttgcatcctctggtacaatttcattggcagtatggagaggagaatttttgtttcctctgactataggcctcagcttcttgcagggacttggga

SEQ ID NO: 64230 - DNA, 1252 bp, Bovine  19866880607695
  misc_feature (1)..(1): n is a, c, g, or t
nttgtttatctattccataaatagtagtgtgtatctgggcttcccagatggcaccagtggtaaagaactctcctgtcagtgcaggagacatgagagacacgggttcgatccctgagtcaggaagatcccctgtggcagggcacggcaacccactccagtattcttgcctggagaatcccatggacagaggaaagctggcgggctgcagtccagggggtcacagagagtcggacccgactgaagcagctcagcaagcacacatgcacgggtgtatctgttaatcccaactcctaatttattctttcctctttggtaactagaagtttgttttctatgggccaggacacagtttgaactgcccacaggcctcgtgaggaagcagtgctcagcatctgggtgctgccctcaggactcggcagagctctcctcctgggcacaccgtccctctcacaagggggacacacagctcagtgtagggctgaacgttgctcatgctgaaagggcccagctcagggcggccaaatccatttgcggaggaggggctgtcagagtccctatttgtcttctcgctgccctgcagcatcctgcattaaagtctcggcagccttccagcagagttttgcttttaactttattatagtggttgggcaacttgggaaatctgaattccactgacacatttacaatcatcttgcctgtcagcccgtggaaaaaacccatctcatagatacagggtcctcctgagctatgggcttcttgaaagataaagactccaccctgttggatgagaaaggggagggtcagtgggcgaaatggttctgacgatgagcacctaccctggagctcctcctccccttggcttttcactgagagagccactgtccttagcacagtcctttgcgtttgctttttgggacacttggttccttcggtcaccaccatcaggttcccagtggtcaccagcatttttttcacagggctttccaagggctgcaaaaagtgtcccaaggactgggcatgggggagcgggcggctgttggctacacaagggaaaaaaaaaaaagtttatttgaaattaaaattaaatagctacaaaattttacattttgttggcaagtcaaccaccacttaactcatgtgggattggcacatgtgaaggccatctgtgtgaggtgtggacaggttgtgtgcagcctgggaagagaccctaagaaagtcaggaggctgtattacactgtctgcaggggaaacg

SEQ ID NO: 64231 - DNA, 1461 bp, Bovine  19866880666621
  misc_feature (1)..(1): n is a, c, g, or t
ncttccctttgttttaagatcctgaattaaagcccagagagacgagaggcatagtgagccctagagagtgtgcagggatgcccaagctgcttcacagtgcattttgcagctcccgggaaaccgggccctttggctcccatgtggtcagctctcccggggccccaggtttgcagtcacctcaggatcaggcaccgaggggaggtgtgtggaaaagatgcccatcggtagtatctagaggtggggcgttttagaaaccctctgatcagtttaattagccccatgctaattaaactgaatttctgggcaattttgggacagaggcagctgtgctctttttcagacatcccactggaatcctctgtgcagccaagtttgagagtcactgatctcagggcacctcctgaaacaactttgggcaaggtttcattcagggtgaggcttccctggtggctcagacggtaaagaatcctcctgcaatgcaggagacccaggttcaatccctgggtcaggaagatcccctggaagaggaaatggcaacccactccagtatgcttgcctggagaatcccatagacagaggagtctggcgggcttacagtcagtccatggggtcacaaagagtcaggcacgactgagcaacgaatactttcactttcattcagaataatgcctgcctgcattccagtccctcttacttcgtagaatcaccaggtttaccatacttatcctattgtgtgtgtgtgtgtgtgtgtgttttaatctttatttatttgactgtgccgggtcttagttgtggcatgcagaatctagtttcctaaccaggggttgaaccaggtctcctgcattgggagcacagagtcttagctactggatcaccaggaaagtaagtcctccccactgtgggtttctttctttctttttgacacatttcattctgtaattccgttattcctccatggcagacacaacatttaatagtcatgtttctcaccaagaagatggtttaaagctttcagcagtatgtgaccttacagcctttgtccagcttagtaaatctgctgacttgcgagagccatcgctaagacttcacagttgcattgttttacttattgagttactttgttttacttcaccagttttttctaaagcatagatgtgtttttgctttgccttgaaaagattataattctttaaaattcaagaagctcagggagggaagaagattcttttattctagacttttctcagcattatttctatagaaagtgagttaagctgttctaccactagaatattgggtctctaaactgttaaagagtagagctttactaaatatctgccaatttttacaatttacatctaaggagagaacaggtgtaaaggttgaagtattatgtgaaacaggaagaacaaagtgaaacagccgtcgttgcaattaagcgttccttttcacaagatgtaa

SEQ ID NO: 64232 - DNA, 1330 bp, Bovine  19866880685268
  misc_feature (1)..(1): n is a, c, g, or t
ntcatcaaactgaaatcccaaactagggggtgtatttttggcccatagtattattttcatgtttgtgaaaagttcattcaaagtccttttgaatccacccaaagtcctaatgcttgttaaacttgtagaatgatttggctcataggaaataactatttttggtgcctgaagttattttatgagtgtagtattaatctccagtcatttctgcagtgtcaacattgaggtatatggaaccgtatcatttgccagagtgtagcttaaacaacaaatactgttttttctgattctcaagaatagttacagttatcatataccctctcacacatccattattatctgtatttagatagattaaatatgaagccctccttctaccagacacctctcaaattctaccgaatctcatcagttcacatataataagagcgagaggtagcctgttcagtcctcagttttctcttcaatgccaggtgtttgaaagaggttcattctacctttttataaatcatgtaagttctttctagtcgtagggtgaatttgccaaatgatctttagtctgttctttcccgtacagggttagtcatctcattttagtggagccttggggtttttctgaacgaccagaccttgctgatcaagagagaccaattccagtttggatcagagccttgggagcagcgttgactccctttaaccctttagctggcctcaggattgcagggccatttggtgagtgcttttatacctgtatcctgtgtgtgtgtttgtgcccagtcactcagttgtgtcccgctttgtgaccccacaggctgtagcccaccgtgctcctctgtccctgggattctccaggcaagaatactggaatgggttgccatttctttctccaggggatcttcctgacccagggatcaaactgcatctcttgcatctcctgcattggcaggcagattctttaccactgtgccacctggaatgccacatatctgtatccctggagagcacagtgtttatagagaacaacagaggtgtatttgctgaactaccattgttagttaaaatcttgaaaacaaaaacaaaccttactttttctcctcctcctctaaaaaataccagtcaatgcctaaagatgactgaaaccaggctcctctcctcaaagaggaatctttttatggtaaacattacagataattagcaggcagttcagttcagtcgcttagtcgtgtccaactctttgcgaccccatgaatcacagcacgccaggcctccctgtccatcaccaactcccagagttcacacaaactcatatccattgagtcagtgataccat

SEQ ID NO: 64233 - DNA, 1905 bp, Bovine  19866880696813
  misc_feature (1)..(1): n is a, c, g, or t
naatggagacagaagcctcttggttggaggtggattggctgggggctgttccgaagaaaagaacaaaggtaacacaggacattccctgaggaagaagcaggaaacagggcaagcctggctccgaggggacgtgggtccagtcgttggccaccgttgtgggcaaagaggttttagctttagtgagcagctatcaagtggctactttggtaatcggcataccctaggcctgctgacttcactgaattttccagaatacatagtactgacccaagaacagcctgctcgatcaaaagtgccattgtttcatgcgtttttgtttatatcccagggagctgctgcccgggggtgaagccgggtaaaggggcagatgatggcagcactggggagtcaggctctcagaggtggaacaggaaggggtgaattgtattagcgggattttctcagagcagagaccctgagcagcacgtgtttggaaggaatcctttgataagctgcttgagggaaagtatgcccctcgggaacacggtgcagtggcctggtggctgacaggaggtcactcagtaagcatttgctgaagaaatgcttgagaaacactacaaggggtctctagtctgcctcccaaggcaggtgggtctcctttattgaagggccctggtttagctgagtgggacaggcaaagtgggttcctgcttatgagcttctttccccccagagagctcagccccttctctatatcggtgttgaataaatacttataggattcatggagatccctcctctttgccattccagatcacttaagtcaggcacagtcagaagtcagagttcagggatgacaagagtaaactcggtctcttgccagctgtgtgactttgggcaactcacttagcctctctggactttcatttccttctctataaaataaggagcttagacttggactcgaagcccttattgaaaccaggcaagtagctcctgctgaagacgatgctttgggatcccaagaggtgggcgtagggtggagcgggcgccaatgtaaacaataactaacattcatggagcatttcccacagccagcgccacaggagccctgaacacctattaacctgcttgcttcttacaatgacacctgtatttatcaagcacctctctcatcccagagatgttgttaacacctgcactgggggagtgatgctaatgccgtaaccccatttcataggcgggagagttgcaggaagagagggaagggcatgcagctgagggggcagagggcatgcaactgaggcaggacctggcctttttcagcactggccctggcggctggttctccctggaaggcctgtctgtgtttccagctatctggccacagggcctccgggctggctgcttccttcctgggagttgccgcccctcagatcctccctgtgctgggaaagaccttgagatggtgaagcgctttgtgccctagagtccgcctaagtcctgtttaccacttcagcatagccaaatggagtaagtgcagtattgattaaatgcaatttttttttggaatacatattcaccctgatgttttatcattaatgcattaagaagctgaacaagcaataagaccaaatggacttcaaaacgcagcagaatttccatccagtgtggtctgatttacagccattacctcctggcagaagacagctcccactccagaccacaccttggctgaaacttgagagctctttgttcttaaccttatttctttattttctcagagagccggtggacctcaggctctgggccatgggggtgggccctgctgggtgatgggggacccgtgtaaactagggaggcaggcagagagggagtaaaggttttcactgcatgcttacggcgggactgcggaccctgacctgg

SEQ ID NO: 64234 - DNA, 2247 bp, Bovine  19866880809222
  misc_feature (1)..(1): n is a, c, g, or t
nggaccgaggaatattttgggtggaggtggagtgggccctgggtacagctgagaaagagaaagctccagggaggctgggggaagatggtctaaagtgccccaccctcaggacatctgacaccccactggacacctgtcagtgagtccaggtgttatgataatggtgtagaaaggctcatttgtccatctcaaaaatgcctgccaagtaaacttttttggggttctttttaatagtcactttaaaggttttagatgttgtaatctacaatatttaaaaactaatcaagttgagggaattccctggtggtccagtggttaggactccacacagggcacgggtttgatccctagttggggaactaagatcctgaaagacatgtggtgtggccaaaaaaagaaagtcaagttgaaactctcagaaccagacaaatatttatcctgaaggcctaagagtataaggaagacacatctagtaaggagtagagagataagcaactagaagagaatatatgagcttctatgagaacaaagcaagaatgaattacttctgcctggaaggttctacagagcaggtgtaagtgacctggaacctgagagatggatcaggttttcccaggcagattagtgagagggaagggcgtgcccaccaggctagtacacaggaactgtgagatgaaccagatcacacaatgcccgggggtggggtggggcatgagataagactggagagggatgtgtgtgtgtgtgcatgtgtgtgacagagagagagagagagatcataaaatgtcttgcacattgggataaggacctgggatcttgcactcttaagtaaaggtgtcctacgttggtttttttttttttttggccgctgcagggatcttagttcctggacagaggtgaacttggccccctgcagtggaagtgcagagtcctcaccactggaccgccaggggagtccctacattccacatatttttgattcactaattgtgtgcagttgttaataattcttcctactccccttttaagaatattggtaaagactttgtcatttctgcatggtgtgtgagaaataagaaaagtaaaaatatcttactttatgtcatgattattagctattacaatttttccattttccctcacttattaagtaatacatattaatttactttaaattaggtaaaaaaaaggatgatttgtagacaaatgaattatcaagcaaataccatgtttccttttgggaccaaatgtcttaaaatgtggactgaaatagaatcttatgattaatatattcatgacctgattttttgaattcttacatttaatgtataaaatttaagtggcctagtttaacaatttttgtgttttgcttctaaaccctgagacaaaaatgaaggttctacagctggcatttatctgtctatgtagacatcaggtctatgtgacagcttcaggtgaaccacgaaggcactcagccatacatatacatgcagtcattcctccccattaaagcagttttaaggggactgcaaggtctgttataagcaagactaaaacgtgttaaaacgtgtaatgctgtatcattaatttcatttgccaaaactaagaaaagctatgtagctaataatggggtttacttcattgtctgacaagatacatagcagtggacactgcattttgtcaataaattagaatgttaaatttccaccaacttcaatttctaaaacaatggtttactcaatttatgttatcttctttgagaggagacaagtcaaaatgacatgatttgagctagtgctggtaattattgggctttcctggtggtgcagatggtaaagaatccatgagagcatcaattaaaaaaaaagtacacctatggagaaaatcaagaattcatagtaacacaactcatctacactcaggaattttcctttaagacaatgtatctcctactaaaacagcagatacttttattaagtcaacactagtgaaattaacagaggcactgttcaaaaaaaaaaaaacaccccccaaaaaacaggccctttacattcattgctgagtcacttctactgctatcatctgtattaagctactttacatttccatattaaaccttgagttctccatactgcgcctacagcacttcacagtcacacttatttaacggttctttaattcagtgttaataaaaatgctggataggttttatgaatctgtgaggcagattagtatcagagagagaga

SEQ ID NO: 64235 - DNA, 1425 bp, Bovine  19866880853808
  misc_feature (1)..(1): n is a, c, g, or t
ngagaaggggacccggaagatgagatggttggatggcatcacgactcaatggacatgagtttgagcaagctccaggagatggtgaaggacagagaagcctggcatgctgcagtctatcagatcacaaagagttggacataactgagcgactgaacaacaacaaaatcccagactgaacaacaaaatcccaatctaacttgctactgtaatgactacaatatactatgtctgcaccaaggcaaaagtgcaaagtgagtgaagtttctgccctgagcctcacccacctcttgagccatgtccccttctttccttttcaaattcctcccagaatcccacctacccagagtccttattacaatgtctcaccctgggcattgcttcaccagcccaagtttcttcttctagccttaacatgttcctgttccattctctaaggttctgcacgttactagttcgataagttaatttcatataaagacatgtaggttggttaagccttgactgtgacagcaaccaggcgaacacatctggcctctaaccaaaacctggtgatgccttacccagaggatggaatgacagtttacgcagtgactgccactgagtcctgaattccatatgacaagcaaatatttaggcttttctttccaagcagaaaggataaagcccaaataatttactccacaggaaggatcttgtagcccagttagcataagttgtgcggcctcattttattaatactttgggctaagttccttggtatattttctttttgtgtcacatttaggaaagaagcactagttctctttgattcaacactaaactgttcacagtactatctacccctagagagtaagactgtaggtgtgtgtgcgtggagggggtggggggtggggcgaaggaaaagggcactgccacattttatgctctagagagtttggatttttcatataaagcacatcaagttttataatttacaagccattagtctcgccctgtggtatggacaaggctcctggcctctctgtttctgagaaggtctcttcatctttggtaactgatgacagatctgatcctcacagcctgctcttctctcttgggaatgcatttgcatccttcctgctgtcacccttctccaacatgaaaggaaatgtccctccagcctggtttttgtctgctccatgagtcagctgttctgatttatttaaaaccttaattttaagtaaaattagaatggagaccacgtctatggatctgcagtgcctcggctcagtgcctggtataaagctgatatgttataaatgtttttgaataatggctgagccctcaggttagtcaaagaactcctgccatgaccactgatccgtttcaatatggcgggcgagcgagccctcaactctttaaaggactttccctgggttgctcact

SEQ ID NO: 64236 - DNA, 1184 bp, Bovine  19866880864711
  misc_feature (1)..(1): n is a, c, g, or t
ntatatctcatttgcttattgtctgtaaagatccaagatggcagagttttttgctccagtcccctgctgggtctatggcccacacgacagggcctggcatatggaagatgcctgatgcatttatttagcagatggactgctgctgtccattcagacctgggggatggagctggcgatgggagagcttcattctccagatgatcaagcccaggaccctgttctcctccacttgcagctgagacaaactgttatgcccacagcaaagacccaaagtcagctgtgaagattgaaggcacagccggaactcccctggaggtatctggagacactagttcttgctgctgctggtgctttttaggtcaaatggactagacaccattgtaagtcacactcaaaggcaaactaaggctccaactgggcccttcccagcagccacagcctaccatgccatggacattctgttgaaccatcacgaagtacaatggtctctcccttcagagttacagaagaaaatctggctggggggaaactccaggccatagtgtgaagcccactccaaggggcccaaacctccttctggaatgcactgaggctcttccccagcatctcattttccagcagtaggatggagctgccctacatttttgaatcctcaggattttctgccacaagcttccaaataaggattgggcactctgtgaaggtctgccccacatcccctaccatcaggggttctccagtaggataaccaggaccccctctccccaactgttagaccacaagttaatctctaatatggtttttcatatgccgagccaagtttgaagaccacctaaaggtcttcccacacactctgcatttgaagggcctctcccgagtatggaatctcttgtggctgatgagttgtgagctcttgctaaaagttttcccacatgtgctacatttgtggcactttccccgagtggggtatgtcctggagtccagggagttcagatctctgattacaagttttctcatcatcttcaagaggattctcctgacctgattttaattcatgtaactttacccctgtctcctggcaggaagacagcccagccacaccattttcagactgggctgctctgatgtgttttgctctgatgaatggagagggtatgttttccaatgaaatctttcccacagca

SEQ ID NO: 64237 - DNA, 1637 bp, Bovine  19866880921854
  misc_feature (1)..(1): n is a, c, g, or t
ntacatagaatatttactattctcacaattcttttttaagttttaaattattttggagggacccattaaaaattttttttttctttctcttttgaaatctgtcatccataaatacaggcaactgtggttaagtttcttctcaattttttcaaagaagcaggaaaaagtaatacctgaagtaactgacatcacactgaatgtcaatttatttatcatggtatttctttaaactccaattattatatgacccaagtcattacttgatgtactacccaatcttaaactgttccttaattttctgtcttgttgaaaagccactttgggaggaaatatattttatttttatatggaaatagataaaatagatggtttatacatttttaccccctaattgcatcaggtggtttaaaccacacaatgccctttggctttttaattagtctgaaaaattaattcctagtaatccccctcaaagcttcttcctgctcctacccctaccttggcaatttcagaggctcatggagcctggaagtccttgagaaacctgcctacctctcatatatgtctaatcatcaaaggggattcacttttagcaagcaaggtcaacacaaatgttgccgatttgacactaaaaacatccttccttcttttcaaatggcagatgatccaaaggattcaagcaagaatatcttgcttggcacatggcctaaaagttctaaatttatgtattctatttttgcttctttctcagatcagattagttactaggcaactgaagtatttaatttcatttgctaatagttacattttaatagaggctgctagtgtacatgactgatgctgccagtacaaacacaatcccaacgccagtctctgtcgggcagtagtgagcgccccttcattctggttctagacaaacacgactctgttcttgccttttatttatttgactttcaggtacaggaagaaggatgtctcttttggaattctttatagaaagaaaattttaagtggtttgttttcttcactcaaaaagctacctgtttgtatccggtcccatcacttcatggcaaatagatggggaaacagtggaagcagcggctgactttatttttctgggctccaaaatcactgcagatggtgactgcggccatgaaattaaaagatgcttactccttggaagaaaagttatgaccaacctagacagcatattaaaaaggagagacattactttgccaacaaaggtcgtctggtctatggggtggcacagagtcagacatgactgaagtgaattagcagcagcagcagcagtcaaggctatggtttttccagtggtcatgtgtggatgtgagaattggactataaagaaagctgagcacagaaaaattgatacttttgaactatggtattggagaagactcttgagagtcccttggactgcaagaagatccaaccagtccatcctaaaggagatcagtcctcggtgttcattggaaggactgatgctgaagctgagactccaatactttggccacctcatgtgaagagctgactcactggaaaaggccctgatgctgggagggattgggggcaggaggagacggggacgacagagaatagaggcggaggcatcaccg

SEQ ID NO: 64238 - DNA, 1441 bp, Bovine  19866881016927
  misc_feature (1)..(1): n is a, c, g, or t
ngggttaacttatttttagagataccaaaggactcagctgggaccacccccttcatatgcaaactaactaacatggagctgtgcctcttctgtctggcctgaacatccccaggaggtgatgttcctctgccttagtcatcccagggccaggtgccaaacaactagaaaccacctggatatcttagagcccactgaaataacttaagcagtccatcctacgctgcccaccctgcactgcctgcatctcccgcagaacccagtaaaggttccctcctggagttcccctcacgcctgtcttctgccacctgatcagaacctgctgcatcttctgtgagccttcctcagtgacctcgctccaggacctgtgagtatactaaactttgttctcctgagcgtctcctatgtcctctcgtgtgggccacacctgactgagcgtcacataaaagaatacagaacgtctggcaaactcctcagacaaatccactctgcggtcacttctctggtctctttgtggtactaggcatacttgtgaatggccatttgtgaattcaagttccaccacaggataggccacaaactaggcctacatgggcacacgtgattgtgaaatgtgagtaggtgaagaacaaaacactgaaaccacacaggaagacagatgagttccctggaacaggtcactaacgactgctgggacaagtcagtgaagtgttcagacgaatccacccaagtcaagtgcctggtgagtcacaaaacatcaatcacttgcagactccaaacctctgcagcctccctcccctttggcagacaacctataacttactttatcaaaaagatggaagctacagctatacctccagtgctctcatggcctcaatctttttaataaagtaggtgtacatattctttgagagaagtggtgttagttgctcagtcgtgtctgactctttgcaaccccatggaaggtagcctaccaggctcctctgtccatgggatttcccaggcaagaatactggagtgggttctcatttctttctccaggggaccttcctgacccagggactgaacccagatttcctgcattggcatcagattctttaccatctaagccatcagagaagccctgagatgagtgagagaggcaaagaaaaaaaaagggaaggagctatttctgcatctcacctctcagcctttcacccaagtctggattagaaaggatgagaaaccatttttatatttttaagtatagtctatggcccacctctactggaatcatcagaagcgtctggtaaagatgcagcccagaaccactgaatcagtctcagagacagggttcagacaccacatttctgataaactacttcaacaattctggtacagaaagaagaatggaaatcagagctctcaccatcacactccgttcttgatcctctccataccgact

SEQ ID NO: 64239 - DNA, 2638 bp, Bovine  19866881160446
  misc_feature (1)..(1): n is a, c, g, or t
nttgtcttaatttgctttccctgaagacctgtgatgtgaaacatatttttatatgcttttttgccatctgtatatcttcttccatgaggtatctgttcaaatctttggcccatgttttaatcaggttgtccattttccagttgctgagttttaaagatacttttggtgtatgttggatagcaatcctttgtcagatatgtaaatattttctttgcaaatattttctcccagtctgtggtttgttctttctttccctctacattgtctttcacagagcgaaatttttaattttaatgaaattcagtgcatcagttgtttccttcacagactgaacctttggtgttatatctgaaaagtcactgacatacctaaggtcatctaggtgttctcctaggtacttgcctaagaattttgtagttttatgttttatatttaggtctttgagatccagcttgagttaatttttgtgaagtgtgtaagttgtatgactggattaatatttttgcatgtggatgtccagttgtcccagtactgtttattgaaaagattatcattgctccatagtagtgcctttgtcgaagatcaattggctgtattttgagatctgttcctgggctctcttactgcccactgatctctttgtgtgttctttcaccagttacttcctgtaactttacagtaagtcttgaagtccgctagtgtcagtcttccaacttcattcttcgtcagtgttgagttggctattctatttattctacatataaactagtatatgttatttccaaataataatttgctgagattttgattgggattacattgaatctgtaaatcaaggtggaaagaactgacatcttgacaaaattgagtcttgccgttcatgaacatggaatatctctcttgccgttcatgaacatggaatatctctccatttcattctttgattttttttatctgagttttacagtttcctcatacatcttctacatatttcattagatttataatttaagtatttcattttggggggttgctaatgtaaatggtaatgtgcttttaatttccaattccgttttttcattactggtatctgcttaactttttaagtgattaatggatgcctggaacttgacctacatatatattcagaaatgttttgccacctgagacctgtgaggaggtaagctttgtggttcaatctgttattagtatttgggaggtggagggagtatgtggaagctattaggtgtttaatttcaatttattatacttttatcaaattctaactattttgtctgtattatggtggagggcaggagtaagaaaaagaaaattcatgtaaacatccatgtctttctcccaagtatctattcagagtaaaaggtgaaaagaatagataccatctttcaaaacagttcagtatgaaaagtttaagaggaaaagaagatcgtctgtccttggcacagatcttactatgttgccctcaagtctgttgctgtcataaagaaaaccactttatattgaaattgtataataagattatttgattgttatatttgctatttatgtatgtatagtctaaatgctacctatttcaggaaagaatttaaggaactcaataaaatttaattggcatagtaataggcacatatacagttaaccaaaatgaaaaccagatgccctctagagaaaaaagatcatttgtttaaaaagtagaactgattagacaattattcaaatagatttctggcttcttggtagccaagtcaaaaaaggtaaatttatttggctcaaagtatataaccaaaataaaatttgatctgttccataaaaataatgtcggggacttctctggtggtccagtggttaagactccacactttgaatgctggagacatgggttcaatccctggtcagggaactaagatcccacatgcctcagggcacactctccccccccaaaaatgacatgtcaagttttagattactaaaacacatttggcactaattagtacttttaaataattatgcgttgatacgtgactatctcagccagtagtcacggttaaaagcagtgtctttaggggcaacagactgtttccaccaattcagtttatgatgaggattatccaataaagggagactttctctcactgaatttatgacataaatggtttaaaagaagaagaaaagagaaacaaaagaagctatgagatactggacagcatccccaaaagttgttgggcagatgttgagacattctatatgttgtggtatctgatggtagtgttcagctgtagaaaaccaggctaaagtgctgtgtcctcttgctctgatacaaagagaggctgtaggagcttggaaggatgggatttacaacacttcctgggctgtttccttcagtgatacccactccttcacccccatgccactgatggcagtgagcgctagttgtcgtggatagagacacagttttctggcttttttgatctcagtccttagaaaactgtattttaactctaacccataaaaataaaagtttcataacagttaaccttgccacatataatatcccagaatattttctgttctgagatatattttctgggttgtttttttgtatgtttttcatgtaggt

SEQ ID NO: 64240 - DNA, 1130 bp, Bovine  19866881211313
  misc_feature (1)..(1): n is a, c, g, or t
ngttatttccacatcttcctcccagttccctcaggagagtgggcattgcctctgtgatgttccttcctctacccaagcatttagagggtgcttggaaatccagctggcactttatacacatttgacgagtcaattaacagatatacatggagctggagtattgatcatattgccattcatagccttgatgacagcccaggaagtggtaaggagagaacaggataagacgaggggcagggtgggacttccctggtggtccagtggctaagactccacactcccaatgcagggggctcaggttcaatccctggtcagggaacgagatcccacatgctgtaacttaagatcctgcatgccacaattaagacccagcgcaaccaaacaaacaaataaaagatgggggtcaaggaggctgcagtgggggcagaggctgagacgtgttcggttgccctgggccctgcccagcatgggggtcttggccgccagcttctagctacagcctcgaggtattttacatgttccattccaggtggaaagactagatgtgtgtccaggtgcggggtggatcttattcttcagcaagacttgaagtctactgtgaagtcttactggtctagaggatctgaggggccaaatccccccacaagctgtgaggagggaggttgctgccatgcccacctgctcagcctgtgggctggggctcctgtggagagctcatgcataaagaaaagcatcatgctccatggcaatactgtgtgatgcatatgcgcccgcctttctggaggacctgcccggacccatctacctcaatgacctgtgactcttgctgttcaatgtcatctcaaatttgctgggcaacgggaggcgaggtccttggcccctctgggccacagttccatctgagtacaagaagaaataaagatttttgtgaaatgttggctgcgtttgaactaagagaatatttctctcagagggatttcttttcttctagaaggagagaaccataaaaggactatcccccaaccctcccacccccgccctggtttggccaactatctgagcaaaagaaacaactagaaatccatctccaacacgaaattcatcaccctagaggaatttcaacatgtcat

SEQ ID NO: 64241 - DNA, 1019 bp, Bovine  19866881307202
  misc_feature (1)..(1): n is a, c, g, or t
ntttgactatatgaacctttgttggcaagcatggtcactgcaaaaatgatggggaattctataaaggggagagccaaagaagggagcctttaaagtctgtatataatctctgtccaaacttccaagctggttgacaggtccagattatagctaaggatataacaactgaattgagatttcagctgtcaccaggagagaagtgtttgtagtggtctgaatccaatcaaattaaacaataaaccaaacaaaaaaaatcaaccctcctatgtcagacgtattgggggtggaggtggggtgttaacatgtagattcctaggcccacaaatcaacagcatcagaatctcctgagcggagggcctcaactccgtgcttctaacaagcatcctcaatgattcaagcatagagctccagcctcgctgtttctagagctgacgcagtccgcaactcatgctcagatgtttgctgaaaagactgcacctgaagatgcaatgtctgtctgccaagagaaatgtgtcagctacccacatttttggtgctgggcacatgaagctgtgaagtcatgtggagacacagagatgcttccctccttcagatcatcactgaaaacttttatggtctgtcccatcacacagggacaggacagctgcccctcagtagtctcccacaggtcagcacaaggcctcccgcctccaccagcttttcctctttggatcccacccaccccatggaaagcagcatgttcaagccttgaatagatgtaagttaaagatgtgttggggtttccataagtcagcagagatatagcaagctggttggcactgctgctgctgctgctaagtcgcttcagtcatgtccgaaggtgaaataccagtcattcgtgtctggcgtcttggtcacaatatttaatcgcttccactgctgtaacttccagctataaaaacattcacaagttaaaaactaggctatagctcatcaggaacacaacaaacgcagcagtaatgtttgtaatgcacctatcc

SEQ ID NO: 64242 - DNA, 1044 bp, Bovine  19866881847956
  misc_feature (1)..(1): n is a, c, g, or t
nctgatttggtgggggaggggaagctggtagaaagtaaagggtagaaaattaacagaaacctctaattgcctaggtttgctgcctggggtatttctgcagtatctctgcggcaggcagcactgtcagtgttttctgacctgacagtggatgaagacccagcaaaagaagcaattaatacttccttccatccccattttatagacagcatctatcatcctgccttagaaaaaaataatggcttgagaattaactttcctagtttctttttccaaaatgtccctttttacctggggtttccctgggctttcctggtggctcagctggtaaagaatccacccacaatgtgggagacctggattcaatccctgggttgggaagatcccatggagaagaaaatggctacccactccagtgtcctggccttgagaattccatggactgtatagtccatgggattgcaaacagttggacagaactgagcaactttcactttcacagctctccattcatttccaggaaacacaaaatggaatgttcataatgatttaattttcttagaatcccaagaaagttaactttatatgttttcatgtttagtagcagggaagggttaacagagaaaaagataattgaaatattttgtccagtaactttgtatgcataatatgcacaggactttatatacaaattctcacccctgcaattctaatgagaaacctcagtcacatcctgtatacatgttaaaatagatatggtcctgaaatgggctggcctaataatgagtatacggtacaatcacaggttaaatgtgttctcccatctaacaaggaaagtgagtgaagagagtgtgagagagagagagagagaaaaaaagagggtccctgagctaattttctagccatcagtcagactattgttcctactaaaagagattgaaagagagagtgagagtgagagttattataataaatataaagtagctttagccacgggaaattacacttggaaggtcaggggggagaatcagagaaggatgatgaagg

SEQ ID NO: 64243 - DNA, 756 bp, Bovine  19866882003960
  misc_feature (1)..(1): n is a, c, g, or t
natctggtgtcctgccccttccagacaccgggcagcctgcagcctcctctcacctgcggacatcagtcctccacgcaggctcctgggtgtgcccaccacagcccagcccagcacacccaccctgcccgctgcccccgttcacactcttgtcccaggcctggtatccttctagcgttcagatctggcttggaaaaccctagggggctcttcctctctctcatttcctacagtcccttattttctgtcccatttatcattaaacaattagtcatgtcctacttctggctgccttgatcggctatgaaagacacacacttaactcttcagctgcccctgcctaacgattccagctagacccgcagtgctcttatcgtgtgcatctctccgcctcgcccagcattgagcagagtgggatgcacacggaaggtgccggaaaggcagcatgccaccctcctccactttaaaatggggggatatatgaataaaagaaggcaaaggcctctgggagagtttgagtgccctgggaaccagaggaggcacagggacagtcattcaacctctgctgtcctccaaaccacctaaaacgaggtctccagtttgtggcttctgtgttttatataaatctggcctcattacacctgattaaatatattgccaattctatttaaatagaggttacgacatccagacattctcctcatccaaagacgctgaaatgcttctatattctgactctcatccgagaccctcatgtga

SEQ ID NO: 64244 - DNA, 1520 bp, Bovine  19866880912795
  misc_feature (1)..(1): n is a, c, g, or t
ngcagcatatcacgcagaagagaaccagatgcaaacacagtgagaactgactttatattcataccacatgctaatattttagatttcagtgctgtcttttctcagtgtaaatagtccacactcctggcctcatgttgagcaacacacctgacaggagaaagaaaatccggaggcagatgatctgctgcattgctcatagcacttgctctgtgggaaagctgcgctcattttgaactctgctgtgcatgagaagacaaaccccataacctgtggtaagccgaaaaacacacaaaattaaccttgataggccaataatggagaaaccaatcaaaagacaacatattagccagtacactaactctgattaattcaccacacttttctctaacaaggcatttatggtccttgttaaagtaactggcctgcttttgttcctctaaattcacacttataaagctagtctatttttaaaacattttatatattcttttccaaatgtcattttggcagtcttctatgagtttttatagaacacttatttttttcctagttcttcataactaaactttgcatgttattaaagaattattaatattattatttactaataggataatagtatgatatgttttattattactaatactacttttaaaataaatggttgttattaaagaaccatctcaacataataactatcctattctataataggtcaacataaggggagtctacagtctcatttcctaaattacacattcatgaacttctttcatattcataattcttccttacatcaaacctaaattggtcctattataaattaaaaaccattttctctgggtcattggaaataggcaacagctggttgcattttctgtacagtgaaattaagggtgaaattgttagagagacatttaaatttagcagatgacacatgaatcgggaagactggagatcccaagtagtcactgtcttatccttcaagttaatgcctaaataacttcaggaagattaacaattattttctagaagaacacttaaagcattactaaactatataggtctttgttgccaggacataacagtaaagtgagtattaaaaattatactatgcaactctctgtgtttttattattagcattttattcacctgagcattcattgactcaatggtctgttccttaacaactcaaggtatcaaatcaactagaatatggattataatttttaataagacaataaagtaatggcatttattgatagtatttttctgtttttaatgatatattaattgcatttctaaataactaatatatattaaagttaaaatttatttaacaaacacaaacactgcagtcatcatgtatgaggaataattataaatgtacttaaaatattagctcatgtaatcttattataaccctttaagataaattatattatcttaagtttagagtccagggggtgtgtcaaggtaacagtgcttataggtgggtattggtacctgggatatttaa

SEQ ID NO: 64245 - DNA, 2254 bp, Bovine  19866880944441
  misc_feature (1)..(1): n is a, c, g, or t
ntttgtgaaaaagttttctttttattgaactgctgaaacaaaagccacatttcagattctcaggcttttacactagcaaacataaaattattttagtacaataaaactttttaaactgttttggtatgttagtaaattaacaattttgtctttagtccaagggaaaaaaatcagcagttttaatatatttataacaaaatctctaagattttagactatttcttaaggcaatgcaaatgccccctgccaccccacactgagatcagacacactttcctaacaaccttgaaatgttctactataaatatttattaatatttcgagaggagtcatattttactagtggtagattttaaaccagtctacaaatgcacttttacttgaactcagctgggagcttcaggagatataatcaatataactgcactataattgaattgcaaaaaaaaaaaaagaaagaaatactgaataacacaatttgatccaaaagagttctttttaagggaaaactttttagagtatgatgggaagtgaaacttctagaatggcttgattattttttaattacatagcaatctggaagtcctatgtctaaatgcagagaatgccttgggcttccccaggcagagattgtattgatttctgcatcaggccctgaacagatggatgtgggtcatagtatcttatgccagaaatcaatgccatttgactccatcactttccaagcaataaatattctgttgtaactggtgctattattttagtgccatctatatttaaattctaaacacaatgtcaacctattaaatattctgtattctattcccacaagaaagtaaatgaaagagatgattaaaaaaaagaaagaaagaaagaaaggcagggctgccagcatcagtatagaaattatattttaaaaaagctcttttctctattcctatcaaatttcagctcaagagtgttatagtaaagatgcctaagaaaacctctggacaatgacatcaggaaatgttccagatgaaaatatatctaatgtgcattccatctggtgcttgcctgaaagcagacttcagagagaacgagaatatagcccagctgctttctcaagtggcacccaaaggaccttctgtatcctccactgttaccccacgcttgaatgaatcttttactcaggcatgatttctgttatcagaaatcagagatctttgatttatggtacattaatttatgaccccagcagagaccagtaacttttagcctctgttcttgtaagacttaataaataccttccttgttaataaccatgttcaagaaagaagtgctctcttagcaaagagaatttctcaaggaatttgttttactttttgaaaactttgattttgttttgtgtctcttttgaaatgatagaatttgtgattgaggatgacctgtaactttccatttccattcactttctcctttgtcttagaaataacagaacaagatggctgagtcctcatgtatattttgtcttcttttaatacctcttgaattcctgaaaatgcatcctatattgaaaaccaaataaggataggaaatgttttgaatgacatatagatagaaagggactggaggaattattgccagaccacattttgtatattttacttcatatgattatgagtctgtagcatctatgaaacttggaagcttaggtctcaaattctgttcaaataaccacaaagttcaaaattaaaacaaataaacacactatctgagcttctgcccgtcactgacttgcaaatatgaaatgtgtataaagtatataaaccatgcatgctgttgcaaaatatgctttgtttaatattaaaaccggtagctaacacgcatgggatgtttacagcagatactttctaagctctttatgtaactaatgtcatttattctgtgaaagtaataaatactcctaatctacaaatgttactttatagttgggatacaaaggggtcaaatactttgtccagctcaccataactgtatgcagttagaaatggggatccattttggacatgtaggcttttgaaagtgaacaattaaatagacttaaattccagcctctaggtttaaattttcagtctcaaaaatgatccaaagttatgcaaattaaattacagagaacctctattcattcccaccagatgtgagaaccccttgaatcatttctttgaaacttctgaatttttataaattccaaagctgttattcttacaaagtt

SEQ ID NO: 64246 - DNA, 1660 bp, Bovine  19866881301738
  misc_feature (1)..(1): n is a, c, g, or t
ntatttggggcaatgtcacctaggaattaagggaaagaggactctagcagatgggctaaacatttatactgaccagccacatgaggtagtgccctcctgcagaccaatggtgctcattaacatattaatatgtctgaggatttctgtgccaaagatgaggatttactgtgtttattccagcatttctcaggggtatttagcgacagaattcttagtcttggtgtatatgtgggcattttgaaacatattttggaaatattggaataaattgttgtcaataacaaatattgaaattaaggaagagatttttatcagccagagtgctgataaaagactttgaaaataccattcaagagcatttccattaatctgtgtttcactgcatgaaaagctagtgtgatagttggtgctattttcctgtagggaaaagggatccaacacttgccaagatttttccacagggggtctttaactaaataactgccaaaaaagacactccttgtgggagtttggggggcgtgattaaaatccagctttaactgctgctttttaagaacaatgttcttttcaaggacaaagctagtgaacattgtcagtacctttactgggcttttatggaaacatcattcactgatagaaaataattttagatatgaagaggagacagttgaaaaattaatcttcactttgtgagaagtctacttttcttgatttctgcttaatttgtgagtgattgatgaattcgtttttacttttcaaggaaaaaaagtaggcctttcttaattgagaaagttttgattgcatgttcacttgacaacttagggaaagttttgtttttatcagaatactaattctctacttttagctatgttgtttctagtaatcttctaatatgtacttacattcaaaagcatgtaaaagaagggccttttaaaatttgactttcatttaaaaaaattaaacataacaagagaaccaagagtttttttgtaagtgtggatagttattttgattttcaaattgcagatgttattgaaaactactttagaaaatttcttcattttcttttctttactgtctgtacttttcaagactattggctcatgtacttggcatgaatataaacaacataaggacaaccaaaggaaattaatccatcacagttctaatttcaatttgctatttttgtcattcacatttttgccatctggaaaattttccatcactagctaaaaatctgatacccattttcaaatactttggagttttatagacagccacaatgtaattttattctcattgtatatggcattatttagtatgctttaaagaaatctgctaattttaatgaatatataaaacatactacatacatatgtgtatgttaaaagattgatatttgtatttatgtgaaattaaaaaatcaggaaaatagctataaagatacggacttgagttatattaattttgcatgaatatccttgcaaaatataaaaaaaattaatttcatataatatgttctcttattatgactagtaaaattgttgttatgaatattcatgtagttttaaaacctaacgttaggcgtattaaataagtagatatttacaaattgattagaaaaattttaataacataattttaactgttttaacatttt

SEQ ID NO: 64247 - DNA, 1300 bp, Bovine  19866880166503
  misc_feature (1)..(1): n is a, c, g, or t
ngaaggactgatgctgaagctgaaactccaatgctttggccacctgatgtgaagaactgactcattggaaaagaccctgatgctggaaaagattgagggaaggaggagaaggataagatggttggatggcatcaccctctcgatgtgcatgagtttgagcaagctccaggagttggtgatggacagggaagcctggtgtgctgcagtccatggtattgcaaagagtcagacatgactgagggactgaactgaactaaactgatgttatctaccatcatctatatataccgtatatgacatatactataatctgtatataccctatatgatatgccataatctccattcctttagtctacttttgtctttatatttaaagtggttttcttgtacacaacagataattgagttttgtgtttttaatccactctgacagtctctgtcttttaattggtgtatttagaccattgatattgaaattgattactgataattgattacattatatagtaggattaatatccacctgactttatacttttcactattcattgcccatatctttgtcactattttatctttcactcctcttctaacttttggttttaactatgcattttatatgattccattttctatcctttcttagcatagcaattatacctctttaaaaatttttttaaactgtttgccctagagatggcaatatacatgtctaaccaatccatgttcagtgtcaaataacactataccacatcacaaatagcacaagcaccttaaaataacaaaatattcctaattcttctctctggtcttttgtatcattgctgtaattcatttcactcatacatactcttcaatcttcaaatacattggtgctattattgttttaataaattgttgtatgttagatcaacttagaataagagaaatatatttttattttcttgccatttattcctccttcagtgctcttccagtctttatgtagatccaaatttctgatatataattttcctcctctgaagaactttaaacatttcttacaaatcaggattcctggtgatagatttcctcaatttttgcttgttaaggaagtacttatttctccttcactcagaagaataatttcagtagatacagaattctaatttggtgttgctatttctttcaagattttaattatttcattccattctcttcttgcttgtatgctttcaaaggagatgtctgatataattcttaccctagtgcctctatgagtaaaataaaatctctttgccttatttcaagattttct

SEQ ID NO: 64248 - DNA, 2701 bp, Bovine  19866880404281
  misc_feature (1)..(1): n is a, c, g, or t
ntgcaggtaccttggtttccccagggtgtgacacacttatcaaaacagggataaatcagttgattcattaagctgatcatcatttgacagcacacaataaattcaaagaccaacccgtgcaggaaagtcaggttgtaaaaatgaatctgtcttacacacccacgtgtctttcctgtgcagctgttttggggactatacagcagtttaatttacgaggactcagagaaccttttcaaaaatctgcctggaatttcatcctccgggccaatgacgtcctgtgcttcttctaaggaagttcaagtcactcagatggagaatcttcttcaacagccttaaattagccttggccctccgttcctatgggttcatcatcataactacctaatgagttttgggggaaacaaaaatctcaggccacacttgttgagattcccataggggatttgggggtagagaccagacatttatcatttttcaagttttctagggcattacaatcaggcttccctggtgcctcagcagtagagaatccacctggctttccaggcggtgctagtggtaaagaacgtgcttgccaatgcaggcaacataagagatgtgagtttgatccctgggtcaggaagaccctctggaggagggcatgacaagccactccagtaatcctgcctggggaaatcccatggaccaaggagcccggcaggctgcaggccacagggtcacaaagagtcagacacgactgagcaactaaacaacaagaacgacaaacaggagattataatcattagaattagaagccgctggtctctctcaatcatctgttatttgacagaagcgcaggaggtgaggtctgggattacccagtctcccctgagatgccgctttaccgaggactcttccctcatccacaaggggtgggtcttgacccacggagttttagtgccggactttcttccaggccatggagatttgaccaagggaaggattgtggcataacccgggccaacttttttctcttattttatttaaattgaatcactgaaagagctggagcaggggacacagaggagtagaatctcggaggcccacgtgacactgctgggttcctaagataaccctggttcccacctttcctgatgcccatgctgttcaacttcccttgaattctgcaaaacactctgcattacccactgggtggcttaaaacaattggaatttattgtctcccagctctggtggccagaaacataccatcaaggtgtcggcaggcttggttccttctgatggctctgagggaaaacccttcccctgtgtctctcccggtttctggtggctgcctgcaatgcatggcatgttcatggggtcccgtttcctacagctcgcacgtacacaccgtctcctggctgccacgggacaccggcgtttcccccatcctcctccacgggagtctttatttccctagccagccccggcgcgtgtggtctgtggtatcttctccacctcagagaaggctgatcctgctgggcacagtggtcattctcacgtgtggggtccctctcgggtctctctgtcccctgcctccacaagccctcccacatgtgcagaaacttgtctcccacaggaagaaagaccagcgagagggcttatcccagggaggggagtagatttccttttttattggacatacttcttttgttgctgattttaaaataatttcaaacatacagaagcatttcaagaatagaagaaactccccgaacagtgtgagagtaagtgactgatatagtaccccatcacccctcaatgctttagtttgtaatttgtacaaacaagaacgttctcctatgcaaaatggccaccatcaaaatcaggaagttaacagtgaaaccctcataccctgtaatccatagatttcatgcaagcactttttctctatgatcacatattgaatcttctttgatggctttccttgatgttagctactcaagggaaaatacagtttatctttatttaaaatgtgcccttcacgttgttcttgagcaaataaggtgagagtttcccagaacaggtgggaacacacgagtaagggtggaacataagcattgtctctgatctcagggctccatggaaggaagtttgggctgggacccctggagaaggactcgagtcctccaccccccactcagttgctttccctttttatacagcaagcatttgcgtggccttccaacggggacacaatgcctgcctgagcatcaggcagtccgaagttaggtggcagctgttcagggagcgagtctgcagtgcctgctgccagcacctgttgacctggggggaagttgcctttggacacagcccctcctgctgggggtggggaagttctggacccattcagattgttgccaggcaacctaagtcttcagggtcagacagtcctgtttgtctttccacaagtatatagacagtttgtaaagaaaacctatcttaagtaaagcttagattgttgagggaacattgcatgcgtgtgcccagtcatgtctgactcttttgcaaccccatggactgtagcctgccaggctcctctctccatgggattctccaggcaagaatgctggagtgggttgccatgtcctcctccaggggatcttcccgatcctgggagcctgtgtctcctgcatcttcctgcattgcagacagattcttta

SEQ ID NO: 64249 - DNA, 1685 bp, Bovine  19866880442371
  misc_feature (1)..(1): n is a, c, g, or t
nctcttgcctgtatctaaagaagctacaaggtcggtcacctggtgaaatcgccatgattcaagccatcaggacggattctccccagcatcttgggattgaagcagagagcttgtcaagcctccagacctctaggatggaagaggagctcaaacgagctcaccagaaaggaggaggccagtgagagtgttagaatctttttagaattttaaggcgccatagcacccagagcagccaggaagtcagaacacatcaaatctttattttcagttccagttttgttaacaaggtgagaatctctttttcgtgcacttttctctaggtgtaaaatttgtcatgctcccaaataacctacgaatttctccctgcctgttctgtcatttaaaaagaattatgttcgtgcctttatcatatcttcactggcatccaggccagtgatgagagaaccataaaaagaatgtcatgacttactttaaattaaagaaatactcttcaaaaaggtattttcaagtcactgcagataggaccggatagccttgtttcaggtacaacaaagtgaactccgggagaaagtgagatggccttcatttgctcttgccctcactagagctggataccacttccctcaccccatcgcttcatccctcctgttctttccttccccacgaaggtaggtaggaacaggaccctagacaatagagttactctgtagcacaggagtggtcaacaggtttagacatcactgcaattttcattgtcttttcagtgattaattcatttatatccttgactgtatatattgcaggagtattcatgcctggcagccttttttggactaatcaatgagctgggtcaggcttttttcttcttcttttctctcttgaggagccattacaatttaatcaccttgctaagatcacaatgaagaagaggctcttgacacaccagtattatccagaagaagcatatggcaagaacaaggacttctataaatttagacccagacagtatatggatctagaacaatactatccaagaaaaatataaggtaagtcacagaagaaatttaaaatttctggtaacgtcattaacaacagaaaaaggaatcaaatgcaattcattttaacatattttagttcacaatgcatttctaaaacattactatttccacatatatcaatgaaacaatgctaattaaatctttgtgggtttttttgcattaaatctgtgaaatctggtgtctttcatacttatattaaatctcaatttggacttaaattcaatctcacattttttcagtagccacatagagccagtggctacccagtcacacagcctgaatgcacaatatttatctgctccaaataactatacaacctcagtcatttatttgctgctctgggtacatgaatgactgtacttagtaatggtgtggagtctcccccagaaaattctgcctcccctgtcctctccactatccattctgaagcagaatttagggacttccctggtagtcttgtagctaaaacccagttcaatccctggtcaaggaactagtgcccacaactaagatcctgcctgctgcaactaagacccaatatagccaaataaatattttttagccataatttaaaacaaggcttagaattcagttgctgctaagtcacatcagtcgtgtccgactctg

SEQ ID NO: 64250 - DNA, 1937 bp, Bovine  19866880471102
  misc_feature (1)..(1): n is a, c, g, or t
ncctggtggctctcagacaataaaagaatctgcctgcaatgcgggaaacctgggctcgatcgctgggttgggaagatcgcccggaggagggcctggcaatccactccagtattcttggctggagaatcccatggacagaggagcctggtgggctacactcccatggggttgcacagagtcagacacgacctagtgactaagcactgaagaggggaatggcacttccctttgttgtaatcagctgtgtcttgagacagcattcggcaggaccagggcatctttgtctgcttgcaccgagttacactaaattgatttgcactgatcagtccagttgcggcagcggtcagtgtacaaggggcgtcacacacgtgctttgccgtcaccttctctgcgtggcagtgagtgattccccagacatacagctcgcggaggtcaaagagtctcttgattccacctttttttgtttttacttatggtggattttctgacaggaaatgggaatttggttgataattaccaggcgtagagataaggtttcctcattaaagtctcataaaaccatgaaaataaatcattgccagtggagagagaaagaaaatcttctgtttagacttttccatgaccgtttaggccaattctttttccccttccagcccggtgactttatatccagctagcgtagggcctgataatcacaggaaagaatgtagaggcctctcagaccttttctgatttcaagttaatggcttggtatgtcaaggacaggctgagcctggcagaataaattatgaaagtgcagctgaagaaacacagtggaggaaacccacatcatacacgtctgcagatacaatacagacataaataaatcctaccatttcagggaaatcgaaggggtccgtttggcctgccctggagatcaaagctggtaggagtcatggagtggctgacagtcccaaaggcgactcccctagaaatgggatcagaccgccctttcctgattccccctctatcaaagccgggtcttagggaccctgatgcaactcagtttctcccaggatttcctcttcaggaattccccaactcggccacaaacccaagagctttccaactatcctgccataattttctctggccccaagttccagctttaggggcactttgctttcagcagagttgatgtgatcagctgatgagaacaatggtgtgaccgggtcactagatgataacagtggctttcaggcttcctgaccaatacctgaccttggttcccagtacagctgtgcctgcagcctgctccctcactggatcgccctatgggagtcgggagagacccaccctaaagtcagctggtaatttcagtctaagggaatccaagttattcataaaccaggtcattaaaatgaagatattgggggcaggtgaccgacgtggagttgcagtgatgaaacctgacaaagtcagacaagccagccccctgccgggtggaccagacacagtacctgaaccaaactcagagctcctttcactctttcctgagagactgaaacacgtcttgggcagtgactgcaaagtaccccaatataagaagcctataagcctatttcctcaccttcagtggcaagtacagcatagtcctgaagctccagctgaaaggctccatgtgtctccagatgtcttggtctgctcgggtcgacattaacaaaataccaggccgggtggcttaaactacagacatttgtttgctcacagttctagaggccagaagtccaaagccatgttctgtttctcgtggggtctctcttcctggcttgcagatggacaccttcctactgtgacctcaagtggccttttctcggcgtgtctgtacagggacagagagagaaagcaagctctctgatgtctcttattataagaacagtaatcctatttgattgaag

SEQ ID NO: 64251 - DNA, 1292 bp, Bovine  19866880484262
  misc_feature (1)..(1): n is a, c, g, or t
ngagtaagcgtcttttaatttcatggctgcagtcaccatctgcagtgattttggagcccagaaaaataaagtctgacactgtttccactgtttctccatctatttcccatgaggtcatgggcccagatgccatgatcttcgttttctgaatgttgagttttaagccaactttttcactctcctctttcaccttcatcaagaggctttttagttcctcttcactttctgccataagggtggtgtcatctgcatatctgaggttattgatatttctcccagcaatcttgattccagcttgtgcttcatccagatcagtgtttctcatgatgtactctgcatataagttaaataatcagggtgacaatatacagccttgacgtactcctttccggtcacagctgcccgtgctgaaagagtacaatatagtgtaaacataccttttttgcactggaaaaccaaaaaaaatgtgtgagcctcactttaatgacatcttgtctttattgcggtgatctggaatcaaacctgctttatctccaaggtctgcctgtataatttaaatattagaagagtctcacttcagaactgggtcctttaaaccaagagctttgggttaaggccgtgttcatactacaggacgtgaagaataaaaagggcacatttataaataggctggttgtcaagctcctccctctctggaactttactactgttcttctctgacattttgtcaaattctgatgttaggctctcatgaaagctgttggaacattggaggaagggggacctgtgtagggtgacatgtgcctggcaactgaagcttataaatcaagctgaaacctggtgaatctacaagatttatggctcatgggaaaatatgctaactcaactgcaaattgataccacaccaaactggcctccgtcttcttacataacaccgctcaaattgtcaggccgtctttgggggaatttattgcagcacgttcgatggaaacagagtctctggccacttgactgagccctttcagaccagctcgaaatgatctctgaccagcttgcagaagagatgggcagagcctccaatacacaccttcaaccaaaacagtggaagggatttgaaaaactgaattcacagagtcatcaaaaagcgatggaaatttttgccctgaaatttaatttcatagaaccctttagaatatatacaaagattccacacccctttacttaggaaagcataacctggctttaaaatcttttgaacacgatcataaaggatgacaaattagggaatgttg

SEQ ID NO: 64252 - DNA, 3800 bp, Bovine  19866880566549
  misc_feature (1)..(1): n is a, c, g, or t
ngattggagctgcagcttcagcatcaatccttccagtgattattcaggattgatttcctttaggattgactggtttgatctccttgcagtccaagggactctcaagaatcttctccaacaccacagtttgaaagcatcaattctatggtgctcagctttctttatagtccaactctcacatccattgggttcccttgtggctcagttgataaagaatccgcctgcaatgtgggagacctgggtttgatccctggattgggaagatcccctggagaagggaagggctctccactccagtattctggcctggagtgtatccagagaattccatggactgtatagtcaatggaagagtcagacacgactgagcgactttcactctcacatccatacatgactactgtagctttgattatatggaccttgttggcaaagtaatgtctctgcgttttaatatgctgtctaggtttgtcatagcttttcttccaaggagcaagtgtcttttaatttcatggctgcagtcaccatctgcagtgactttgaagcccaagaaaataaagtctgtcactgtttccattgtttccccatctatttgccatgaagtgatggggccagatgcatcactaataatagtaaccaatattatatgacatttactctgtgtgacacagtgtgctaaacttttaccataggttaatttaattttcagagacccctgagaagtttatgtcaacaaacccccatatttagacttactgagccttagaaagacgttgggatagaaagccttctcaggcctgctgacttgtgttcctgcagtggggagtcccagccagagcagctctttcaagaggatgagccgggcttgtgggaaccacactgggaggatttggttggtgttaattttcattcagctacagttgctttacaaggttgtgttaatttctgctgcacatcagactgaatcagctgtatgtttatgtataccgcctcttttttcacctgaggaagagtttacaggaaaggagaaatgggttttagaggatttcaaggctgttaagggtctccaccctctgcccgttaatccatgctgccgtaagacaatgccactagttctggagactggaactccaagaccgaggggttggccgatttgcttcctgcccagggctctcttcctgacttgtagatgacccccttctcacgtgtcctcatatggctcttcgccatcagtgtgtgtggagagggaagaactgttctctattccttctcttattgggattccccggtggctgggcagtaaagaatcggcctgcaatgcaggagatgcaagagacttgggttcgatccctgggtcaggaagatcccctggagaagggaatggccattctccagtattcttgcctggagaatcccatgaatagaggagcctggcgggctacagtccatggggtcgcgagagtcggacatgccttggcaactaaaccaccacctccacctcttcttttaagaccaccagtcctatcagattagggtccacccttatgacctcactgaaccctcatcaactccaaaagacccctgtttacggttggggctttaacatttggatttcagaagggcacagtctgcagcaccccaccaccgctccaggggacaaatatgacacctcctgtgcctagtacgttctctactacctcctggtgagtggcagtttaaaaaaaaaaaggtatcaccagagggactgggttcacctttgtatcaccagagggcttatttcacaatatttggcatttctgtgggcagcgaggtggcgtgcgttccttaaataaggcaaacagtggccctgctggggaggcctgggagcccgtctttccatgccgggaggggtgtgttgcgggcgtgcaggtctgatgtcgtcatgtctcctgtgatgcatttctaaatatacagatacatctagtcgtcagtcatgtcacaaatatttattcctcctgctgtatgccaggcactgtttatgggctttgacaatacgtgataagcagcacagaatactgggctgccttagcggtgtgtcccctgcaggttaactgaccagtcaacagaaacacatagcacagtatctgtgctgagaagaatacagacaggtgaagccattggggaatcgaagtcttgatggggttgggtgctattttagaaaaatggtggaaaagtatcagcaagagccaggaaactatctgagagagaacgttctggacagaggagatgtaatacaaaatacagaggttcactactagatggaatattcttggcaagtactggaagggggatacaggttctgggtcatattgcctgaaaatgctcaaataaatgtttagtgttgctaccattaatgtgattatggtgcagatcaagaaacagaactttttctgcccaaatgtacttgtcggcaattaagttgtaaccaggatcagcttgccacccctctccccttttaaaatcaagattaactgttccattttctgagtcagtcctcagtttatggacactaatggagcgatgctgtgtttctccgagctttccaccaaagtgttatagatgcaaacactgaacccaagaggatgtgtgtgtgtgtgtgtgtgtgtgtatgtgtgtgtgtgtatgaacctaagagggtgtgtgtgtgtgtgtgtgtgtgtgaacccaagaggatgtgtgcgtgtgtgtgtgtgtgtgtgaaccaagagggtgtgtgtgtgtgtgtgtgaacccaagaggatatgtgtgtgtgtgtgtgtatgcatgtgtgcacaggtctttccataaagggaacatttttttgtaatctcttttctccttctggagatccatgccaattttacgttcttctaagtaatacatttgtgcctactttaaaactgaaatactgttttaaatgcccggcctgtgttgtgggtttgcgtaccctcgcccccaggcacattccctggctgcaccagactgagcagctctggagcagagccatgtgtggatgtcatggcccgcatccagcagcagctaatgttacccagggggattagggtgtgggctgggtggttttactgttagtatcctgtaaagtgaaacacaagaatgttcaacttccttccataaattatatataaagtaaaaaccaagaaaatgccgttttcttcccagaatgagcaatgtaaagtgaagcctaagaaaatccaatctcctgtcaggaacgaacagtgaaattgaccctggcgccatcggaagagaatcaccagatagatgatgtagcaacaagcatttacccccaaatcgctttaatttggctttggaacgtgtaatgtgccactcacttttgcaggctcattttccttctagattaggtttgattaaattattatcctgacggtctctgaacatttattataagtggtcataggtgactccagcgtggcacccaggctgctgtactcttccctcccatccctgcgctggccatgctgcctaaggatccttctcgaaaatgtgttctgggagatcattactaattgatgagggttgccatggagatgagacccatttgctgtctctttcatgttaagcatgtatggacctctttggataattgggaaccagatataaataatccaatggccattctttcagctttatgtatttttaataatatacaaacattttttaagttaagaattacactcagttctatttctagaatagtaaatgaaatccaagaaagtttttagtaaaactgaaaatgctactta

SEQ ID NO: 64253 - DNA, 1761 bp, Bovine  19866880644297
  misc_feature (1)..(1): n is a, c, g, or t
ntgcggagctcagctgcgtgaggggaaggtttggccggcgttccttcacttgcccggcatctggacctggtttcggtcattttcccctcctattcgtggatttcgtggggaagtgtggtgatgccttcttttcatgtgtgtttacgtttcattcctcagttaattggaagcaccttgaggtcagaggttctgcggatatgtctcctttgaaaaaatacggcagcttttgcgactttcatattttttcccctgattccatcttacagagaaggaaggataactcagtcataattaaataacccagtgataaagtaattcagttttccgctctttgaccttctaactaattccagtgaaaagagctataggactcaataatggtatctctttaaagcaacagaaacgctgaggataactttgaaagctaattgggagatagcctttcaggttattttcaagtgtagttgttgcttctcaaattggaggcatatttgcctccagggaccagggccctcaccgaaggtttctacaacttcaacatcattgtggacagtcttcctagagggtcagttcacctgtacatttggggaagtaatgttgaatggtgttcaatggataacagtttttatcatttttagacaaaagcagtctattagagagtataatccatagcttgtatgaatttcagggagacttcaagacagaatgatttttttcctgcgttttgaaaacctttctgggcatcccatcactcctgtgcaatggaaaatacaatgtagaaatgtctgagatgcattcaggtgcattagaaatgaacagtctacaaatccaaatgctgttgtaataaaagaaaaagcataattttgagaagggtaacttctcattttccccttgcttctccatagttttcttaccagtcaagacatcatatttcaactcttgtcttctaaacagaagactcacgggctctcagtttttctcactttatctttttcttaatcttttctcactcttatctttttccttcttgccttctttggacatcgatgagaagaactgtgggcagaaaaacaatctgtcctacattgcaatatggaaaattgcacatctgcctccttaatttatagtgtcatatccagagtgatctggagaagccttagaatttaattttctttgaataaattgtacaggctgttgtggaataagagagagatgtctgcatcaaggctcaggtggtccagatactaatcctgactttactaccaactctgtgtgaccttgggcaagtcatcctccccacgtgaactctagggttacctgtagtcaaatgattatgtactagatgactttctgtcttctccggcttgaaaatgccattattctgtgttcctgatgctgggaaagattgaaggcaaacggagaagagggcagcagagggtgagatgattggatgacattaccgactcaatggctgtgagtttgagcaaactccaggagatagtgaaggacagggaagcctggcatgctgctgtccgtggggtcacaaagaatcggatatgacttagtgactgaacaaagaatcctatgagaagtgactgatccagaggcgtttgagaattgtaagttatgtatattagccacgctcttcaccttgcgtggatactggtgctcgctaacacttgtagggataccaagtgtatttgttctttaaatatttagtttccttgcctgtactgtgctgcatcaaatccaactttaatt

SEQ ID NO: 64254 - DNA, 1513 bp, Bovine  19866880728199
  misc_feature (1)..(1): n is a, c, g, or t
nacttttttttttccctattgaatttaatcatgggatgaagtgtccatataaagtcccagggtggccagagtgcgcatccatttggaaagtatatcacccttttcccgttacctgggaaacaggtggtcaggtgctccatcagtgcttcttgggtgacaggttttcttgctgagttcattgcggagatggccaagcaaaggatttccccaagtgggataaactgagattgactgatgggagacatgctgattggtgatacatcacctgcagaaagacaattaccaagtaagcagttcgttaagacccagccacttgtcacaaacacacacacacacccctccaaacacatacacacacacacacccctcccatgactcacctattccctgtgctgcaaatacaatcaaccctcaaccctgaaatgtgttactgccacagccacgtgcactcaggtggaaagacttgcacagaacagcagaagcttcagctgcctccacaaagaaaacttgcctttaaaacctgagctctcgttggaatagacttactactgaaaggcgtgcaactgtgaagctttttcccaatgatctctgtttttttttaacttggaactgatttgtttaataactgtcatgcacgtctcgacaagtgcacttgtggtaccttgaagattcattcattcaaacgctgggtgctctctgcacatcagcatcttctgggggcttgagaagcaccttggagagtgaataagctccctcccaccaacatctctgccctcaaggagtttctatgtacgtggaggagacagacagacagacgaaaagttccctatgcagaaggctgaacaataatctggggcagagggggagggtgacgaacacacctggaggtgaggatgggactgagacgcaggaagtgagagaaggtttttctgaggtcatgtaacctgaatctggggctgaagtgggagtgtgccagcagcctgcgaggtgcagggctattttctggggagccgcagagaagggggacaactatgagcaaagaactgagtgcccaagggcttcatcctatgagggaattcaaggagtgagagagtcagatgtgaatttcaggaagagacgcccgtggccacgtggaggatgggcctaccatccagcaggacctgtggcctcctgcacacatggatctgaaagagcaggcggaggggccccacatggctctcggggaggtggcaacattcggcacatgtaactgtctcccttgctgcaatcttgtatcacagtgtgattttcaagtcgtgttctgagaaaggatctccagcattccccagagaggcttctgcgggcaggcaggggagccccctgcagagggagaggtggagggcagggaaatccctcctgacatctggggcccacctgttcctcctggggttctgtaaggtctcgcttgagaaaggccgttcagaaagggggtgaggctctcagcagagtatctgtgagctttgaagcttctttt

SEQ ID NO: 64255 - DNA, 2636 bp, Bovine  19866880769974
  misc_feature (1)..(1): n is a, c, g, or t
ngggggctgctgtgctctaacctgagacgacccgaacaggctcccaggtccccaggccgcaacagcacaaaagagccctcagtcctggctgaggggaaccgccagtcccggacatgagaagcagacaacgcggtgcacgacacttttcctaccctcaagacatttacagtccacctgggaaactttacaggcattaaaattagccaggtattatgctgctcagagaggcgaagtgacttgctcaagctcacggtggtgaataatttgtggaacaaagcttacagttctttcagtaaatcaaagaaccaagtaatattagtaacagaagctacgcagaggcaaatattggattgaggcagatcaaataatggcattgttaaagccagacaacctctaagaaatctggccagtgacttttttttttaattttaagatttatttatttatttttttgatgtggattgttttaaaaaatctttattgaatctgttacaatactgcttctgttttatgctttgagtttttttttttttttggctgcgaggtctatgggattcccagcttcccaccccctgcattggaagacgaagtcttatctactggactgccaaagaagcccctagccaatgacttttaaattctcatcatcgccagtattaacagatgtacttcaatatccacctactgggctgccttgcagtgagaaaccacgcacgttctcagctgagcagctcatgcttctgataatacaggcctgtgcccccagtgccttcctagataacagaacagcagcatcctcacactcttaaaagcaaaatgatgaagggtttcggtgtgaccctctctctcagaacaagcacagttcctatgttatgaaaacctgctcagtctgtcgccaacttgaggacagaggagtctcccagaccctctccggaggcacaggtaagaaaaaggcagtgaggctgtgctgaagaagagtggagagggtaaaggagggaccacgaccagagctgagtgacacccagacatcccccaggacgccagcggggggcttccctcctacaccaaggaaggtgcttgaagctgtttaccttcaaactccgagctgctaccaagcccagcacccgagtctctgcagcactgtctggggaaccaacttcctcactttaaattgtgagtaggtaccgtacagccttaaagcttcttccttccaggaagaacggcacagttccattcctgcccttctcatgaattctcctcattctttggctttggggtggggttcggggagaccccacaacctttatattccaagatctgaaaggtgatctcagtaaaaaacgcatggtgagcgcccagcagatgtcaccagaggaataaagatgaattctggaaaacgccgggtgagcccactgaccactgaccgccacacggtcccctggtcttaccttcttttggcttcttcatactggaggctcagcctgaccttttcagctaaatttgatctacttctcactccaatctagttaaaaaaaacaaaaggggaagaagtcaattaactctgctaatgaatgaagtaaaactgcttttgtttctaggaagtacgagtaattgaaaagctaaagaagatagtatcgaaattgggaacaccagtttgcaaaggcacttactttcgcgtctcagtggggacaaaacatttctttttaattcaagcttgttgaatttttttcaaagactttaacatcattttctctacacattaaaatcaggattaaaaaaaaattaggtaaatgcttctggtgtctaagagtttatgaagggcgtacaggtcaataaaatttatgaactggaactaatttccttgtctctgtgagccagaatttccatcatttaacttccaaatgcataaacataaataaattacttcaaaaattaatttttcaaacaggtaagcgctactgttgatctctatctgctctactttcatagcacagaattcaaagaacacaaaaattactgggaacttattgaaaagtaaatatctgctaatggtgtcccaaaaggtagactataaactggtaataatattcaaaccacattaaatattttcaagtgccaggtataaaccaccaatcaaacattttaatataatcaacttcagatgtgtaaaaacaagttctttggtttcatttttaaaggcatatatttatgtttttcattagccttaatgtgtatttggaaggaccttaatttccaaggctctaaacttaagaggaaaacttaaattctcacgtgtctcttgtctttcaatagggtctgtgaataaatacagtatgagaaagtttgaaccaagctatttatctggacagattctgatatgcttggcacctaggcagaaaagataaggctaaggtttgtaaatccagtcttatgagtacgaaatgctgcatgcacacagccggaacttgcaccccttttctggcccccgtcccatctgccagtgacgctataatcagggcccttccacacggatgacttacatcgccggagatgctggtttgtgagcctacgtccagggtctgtctggagagggagagacgcgagctcacgggactggatctcaggtctggctcaga

SEQ ID NO: 64256 - DNA, 1518 bp, Bovine  19866880843908
  misc_feature (1)..(1): n is a, c, g, or t
natgaaacgtggacctaaggggcctctcttctgcctaggacttcagccacggacggcgtccccgtcatcagcaccgtcatcaccctgccccacgtgatcgtggaaaacatccctctccacgtgaacgcaggtgcctccactcaccttttatttgatctgcggaatccaaaaagaatatttattttagctgctaagattttttttctaactttccccattacgagaaatgcccaccatttacaaaaagtagattgtgaccagtcttgtttatctatacctctacacgaccctcctgccctcaacattttgaagcaaatgccagaatgttatttcatctatagagatttcagtatgcatctttaacatcactggctgtttttctaaacataatcacagagtcattatgattactaaaaattagcaataattttgcaatatgatcaaattcctgtgttgaaatttccctagctgactctgaatgttcttcatagtttgttataaggcctctgcattgctgttgattggcgttggtgtctagactcttaaaatccctaggcaggcagacagcctctcccccactgcgctgcctctaccccacatcacctcctctacccccttcatctccccccttcgcttccttgatgttcatttgttgaagaaactgtcctcctgtaaagctgcctatagtctggatttgctgacttgcattgcatcatttttaagtatttctctgcccctataaattggtaactgtgcgtgtgtgtgcattcagtcactcagtcatgtcttcgtgactccctgtagtgctccccgccagggtgactccccgccaacctcctctgtccatggcatttcccaggcaagaatactggagcacgttgccatttcctcctccaggggatcttcccgaccctgtgtctcctgcattgcaggcagattctttaccactgtgccacctgggaagcccagttagatctatagtcttgatcaaattcaggttaaagattttgacaaaaatacatcatagtttccaccaaggggcccataatgtctgtcatcccatctcgagccattattgatatttagggaaattttttgtaggtttaagaaattaatcctaaaaggtaattcagctcttggtagccaagaccctttctgagccaaatcagtttagaaggagacattgattcttcttagcctgctttatcatagccctgtggctattttacaatcagagaattttcttatttaacaacagtgcagtgctctcattaatttaaataattccatgtctatggaatgaaatttatttacaaaaggaacccatgaatggtgagctttgttgttttttttaaccaagagaaatgtcacctttgcagatctgccgtcattcgggcgtgtcagagagtcgctacctgtcaggtatcacctgcagaataagactgacttagttcaagatgtcgagatttccgggagcccagcgatgccttcatgttctcaggacttaacaggtacagg

SEQ ID NO: 64257 - DNA, 3031 bp, Bovine  19866880882584
  misc_feature (1)..(1): n is a, c, g, or t
ntttcagttccattaggatggctttggcttcactaagttcatagccactctggcctccagacatttttttatcaattctgttaaaagagagggggaaaaaacccaataaaagaatatcagagtacaggctaaacagaccacgggaactgggtgtggggatgttgtggttagctgatgtttactgctggactcacacacagcagcttcagggtggtggtctctcctcctttctcatctgaccgcttcgagatgagacccctaccacccccgacctcatacccagcccactgccatcagcgtcgggctcaggcttcttgtttacagtctggttgggtggtcccaccgctggctgaactcaaacctcatcacacactgatcctggcaaaggtttggggctcgaggaactgattgaacaggaagacagaaatgccagtaaactgggcaagcccaggaaccttgggattcatcgctgccgtctaattttacgtgccgcgacgtctgtgcaaaacctagcacagggcacagtctggtgactgttaataaagggtggcgattttcgcttatactagtgagtatcctataatgcttggattgtttggttagtttcttgtttctttttaaatatatgaaaagtattctatttttatgacaattatgagtcaagataacattgcctgtcttgctgaatgagttaaaatctaggaacaagacgcaagggcagacgtgttcatttgtccgttgatgttgaatcaagagctcgcagtgagcttgccgactagtacttggtaagcagtgctcgcttactgaatgtccacacaattcccagggtcaccctacgtcagaggatttcaggtaactgagaaggggtcacaggacccaaccaaatgacctcattcttaaaaaaaaaaaaaaaaaaggttaaagttcttcatcatcacctatgctgcttgggactcattaggaagaacctgggctttacttcagaaacacactgccacccccctgtcccaccagccaacagtgctgtgacacacggtctcgggcatgtcctgtctaattcccagactctccggagataaggcacctattaaatcacagaaaactgtctctaagctaatttggtttaaaacatttactaatttgtatttatttcaatgtgaagggtacagtctgaaaaaaaaaattaactaacgtcatattatcttattcatgcttttaaagtttactcaaatgagggcggtttgtagataacttatttttacaagtagcactttagaaaatattttatggggctgaacaagtgattaaagtctgaaagaacctaggaaaataaaataaatctcatcataaatcagttctataacatagtatatacaaccgtgccactggatggaccaaagcagaaataacgcctctcttgctggtgtccatctacacataagctacactattgctgagggccaaagtccaacccgggaccacagtctcaaatgactaacacagagaatacaactacattcattcatccagcataaacgatggcaccgggtagaatgacaaccggggcttaaatcggtgcacattccacaaaattattccattttactgtgagtgtgaagttgcaaaatcctacagcgggattctgcttaaatttattcctgaaatatattttcggtcataaccccaagtaagattccctttagtatcaggaacgtgatttcttgaaaaatatggtctctgggtataatcaattatgattcaatcttctggtagtatggtggtaaacatttgaatgaaaacagctttattctgtctatagttaagatgcacgagaggcgtctaacgttagatatggtatctcttctgctcttggttcctcagattagaatcactgcaagagaaagcctgggtttctacaacaaatggctattgttttcttgtggaatgttattgacagattcttaaacatgccttggattcctataaaaattgcttgcaagcaaactgctttgaaacaatatatcattgtttcatcgatataacaaaaacagtaagtttggctaacctttaatcctggtggtgacatgagttataatttcttgtgtcttaaaagtatgtaacgtgtggctaaatgcttcctggtgtttctaccctgacgccctcctgtatgttgatggacaactgactaaacaacacatttagggtaagccaggtctgctcaggttctggggctgcgctgcaacctccacagaggttctctgaacagagctggacctgggaaccatgtgggggggtcttgggatggagaccagacacatgtatttttttttaagagctcctcagattattctaatatgtagtcaggttggagaaccaccagggtgggagcatctaaaagaatctcatggtcatgattacatgaggtgagtgtctgagatgaaagtcatgtggctggtgacggagagaagcgatgggggtcccgaaatacagctcttcaaccaaacacacagaacgatctgctcagatggcccggccagtgaacacgtgggatctttaacggggtgacaccttgctgcctcggatgctgtggaggcagacggaggaagggcgtaaacctgcctggagaggagcccctcgggaagccccggtgcatcctgcctcactgctggggccccatgtggggcagcaggagaggagaaggggactggaagggccgccggatgcctttcaagggacgatggcttcagccctccccgaggccgtgggctgcgtgaaccatcaccgtgtccctgcctcggagatcctggggtgggtgctgcaggagctggatgcctgggtgcacgtcggggcctgggaacagggcagggagccccagtcctccaatctgccctccatcatccacattctcctttgacctggctcagcctgggccccggggtccagcggacttcagcacaaagcaggaaagggcggagggaactcaggggcccggacacgcacttagcccatccacagacacccctgactggct

SEQ ID NO: 64258 - DNA, 4021 bp, Bovine  19866880882970
  misc_feature (1)..(1): n is a, c, g, or t
ntggaagctgctctgggcgccttggtagaggtgggtgggagacaagcagtgttcagggaaggtggtctggccacagggtgacctagtgcggagggggtaggggcagtgatgggttattttgggtgcaagctgaaaactgatggcgttttcagcctcggcacttctgggtcatttttgacttcctcctctgacattccctgtttgtctccccggaagttcttcatgttcagggcacagccgactacccagggagcacgtgaaaaacagattccggagctgcattcccggggccgggagcgagcctgggaatctgcattttcagtttgcatcccaggctatcctagtgcaggggaattgaggaccacttttgagaaagctgacctggttagtagtcaggttgtatcaggtttggagcttctttcttctcttctgcctttttgatcagccccttctttctgttttccctgccactgtcctcctggccccctgcctttcctccccgctcactgttctcttccagaccctgctcccattggaacctcagggcaaccccaggcagtccgtccccttcacctggttccagggtctcctgtctctgtccgccactggccttgcaggcacggctctcttcctcttgctgagaaaactgccctgacctccctgctaagtaagtggtggcccctcgcccccatctttgcgaatctgcagcttctgttccccacactgcctagttatgggggatgtgtcagctgtcagcgtgtcagaggagcccaggctttgaatctggcagcgactctcacctccatttttcgtgctgcaaaaccggtcctgcagggtttcctgagataattcccggaaagagacttaagtttaatgcttagtacataggatgtgtttattccaatgttgtttcttcctctttttcttatgtgtcctgaatccccagctggaccaaaacaccctcaatagacaaaaaatgggctttccgttcccctctattctcagcgttgagcttagttggcttgataggtaataataatacagaaagcagtcacagtagtgacagtgggggtaacggtaacagcaaacgtataaagtatttgtgatgtgccagacgttgcatagagcgttactcattgcatcttctcagcagagctttgaggtaggtgctgttctgtacgcgcgatgaggaacgcggggcatggagaggctgcgggacctgcccaagggcacccagctgcccaggcttagaatttgaactcagaacgcctggctgcctccgctgtactcttaatagcactgaagtaagaaaaaagcccactttacatatgtaaaatatgttgaccatacacagaaatagagggatgcatacaatgaattcctatttaggccgcttcagtgatcatcatcatgtcctatcttactttatctgtatccccacccgctcctttgtctccactttgtattattttgagacaaatcctggacatacaccctccctgtaaatacttatgtgtaagtaagtaagtgttagttgctcagttgtgcccgacgctttgcgaccccatggactgcagcccaccaggctcctgtgtccatgagattttccaggcaaggatactggagtgggttgccatttccttctccagggaatcttcctaatccagggatcgaacccgggtctcctgtactgcaggcagattgtttaccgactgaactacaagggaagccttatgtacttataataattatgtatgtatctataaatgacggatttcttagtataatcacaatgcttttatcacacttaaaaatgttatcagttattccttaatctcttcagttttgtgtttaaatttctctgatgattgaattagcttttttttttttttttaacaattcattggttcacatcaggatccaaacaaaaaaatagcccatttttcgtgatgatttttaaagcagaatacccgaagatgcttacttactgagtttaattcagcagatatttatcacatgtctgtgtgttttgcaaggcacaatgcgagggtgatgaaagatattttctgggagctgtcaactggccgtggtgactgataggattcataaatggcagagggcattggcttgttttgcctctaaggttacaagcttggagtgagcgatgcaggagtagaagccttgacggagaaagggaaggtggaagaatgaaacaagcccaggaaaaatgtgatggctctggcttgtggattgtagttagagcttaaaatcatattctgtcctacatgtatatgtctgcattccattcttcttctctgactttccacttgattcttctttcagtggcaacttggaagtcatgatgctggctttgttttccttgaaaaaaatcttgatagaaatttaggggtgagcttcatgacgattgtgtctttgagtaaagtaaataaatgtgtgtgtgtgttgggggaggtggtaaatccacacatttcagtggcataatcccagtggtgacagattcaaggttttaggtatgtgcttttattgttccgtctgactctaatggaggggaaaatgtcttgtcaaaagagaaaagcattcagagaacgggaaacattaaattctgtgaaatatttctgttcgctttgagattattcgtccctttggtttgagggcctttctaacttcaaaagtgatttaccttgagtttgatggaatcgggctttaaaactaggctgagaatcatgtatatgctataaaaatctaccgctgaaacttgctgctacaaacatgtgtgtttcatcaagtagatttaagttggaacaggcataagaaagaaaacagtttgatttgggtgccaactgggagattagaatagcaatttgcttatttcagctgttttattcagtagcacttataaagttgactaatttcctccacaaatagtttgccaacttccattaagaaacaagagattttaggaataaacttttactcttttcctatccaaagaggtggttttcagtttttttttttttttttttaaacgatcaaaactatcacatttttctttggctagagaaattctatttgaattcctgtctgactcatttttcatactcattaaaagttatttataaaactgaatcctgaaactactggatttttggtgagacagttaatccaatgtgctttaaaaaaatttaagtatagttgatttataatttgtgttagcttgattcagttacatatacatgtttttttcagattgttttccattataggttattataagatactgaatagccctgtgttatatagtaagtcattgttgcttatctattgtatgtagagtagtttgtatatattaatctgatactcccactttatccctgcttcttctccttttggaaaccatgtctttcctacatctgtttcagttttgtatatagattgatgtgtattatatcttagattccacacatgagtgatgccatgtaatatttgcctttctttacctgacttagtgtgatcgactctagatccatccatgttgcacgaatggcaatatctcattcgtttatgtggctaaataacattccacacccccaaactacatcttcttaaaccaattgtctattgatgggtgcctgggttgttttcatggcttggttattgtaaatagtttttgcctgaacattggggtacctgtatctttttaaattaaaaatgttgtctttctggatatatgcccaggagtggggttgctgggtcatatggtagttctgtttttagcctttgaaggaccctccgtactgtctgtcctccacagaggctgcacccatttatattcccaccaacagggcaggagggttcccttctctccacaccctcttgtaaactgctgtgaattgaattgaacttcagatctgtaagttattttttaaatattaaaaatattaatctctatattccatattctctgcttgggatgagctgtagaagggcagagagaaaaaag

SEQ ID NO: 64259 - DNA, 717 bp, Bovine  19866880885696
  misc_feature (1)..(1): n is a, c, g, or t
ngaggccgggcaccttcccggctccctgtccatcaatagcctttctgcgcgctcgcgatcgccgagccgcggtgccgccgtgcggggtgtcgaccggcagatgccgcatccttggcagccatggctcccgtcgccgccgcggccagtaagtaggagcatgcatgtgtaggggggggggggcacatgcgtgtcggcgcgcgcgcgcacacacacacacacacgcacacacgcacgcacaccaccccgagcctcggaaggaaggaggaagaccgacgaggcgctgcagttgcgaggacgactcgggctcttcgtgaattcggcaggagccggcctggcgcagctgctgactgcaaagcctgccccagatcgtgggcacacgcgcccccaaccccctcacccgagcctctggaatgaagactgcctcccgaggactgcaggggaggcagagccagcccgtgcccgggactgcgggccgcgcggccggtaggcccagggggacacgacttggacgctgtcatccccacgcctcgctctgagctgcccggtgccgagagggtctgccgccgccccctccggcttcccgggcgcccgatcccgggtcaaccccggaggccccggcttcctcatttgtttggggcttttgtgccgggggctcacagttggctaagcactccagcgctgaatcgggccattgtctgcgctcccattgcttccacg

SEQ ID NO: 64260 - DNA, 1388 bp, Bovine  19866881122116
  misc_feature (1)..(1): n is a, c, g, or t
nggtaggcttctctcatagctcagctggtaagaatccgcctgcaatacaggagaccccggttcgactgctggattgggaagatcccctggagaagggaaaggttacccactctagtgttctggcctggagaattccctggattggatagtccatggggtcgcaaagagtcggacactgagcgactttcactttcacttttcactttcaggagagtgtgattaaccttcagtgtactgggtaggagcctgccccacagggaggtccagtgatttagtcccagtcacgttaaggagctgggcagagcgggaacatgatcctcgatgatttacagttctggctcctcgctctgcctcctacggggcttgtatggtgcaagaggacactgactctgattccccttttattctgagctgcaaaacagacttcccgccataaaggaggaaggtaacacaggctcggtggctctccggacaaggaaggctttgttgtggcttctgttcatggcttccccgggagccgtatctcttatgacaactggcaggctcttctctcaccgctaggcactttacagctacagtgccgaaaaccccacaaatccccaactgcaggggacaggtggatgtcaagggcaggggtgtgtgtgcacgtcggagtgtgcactggggtgtccccgtatgtgtaaggagtggaggtggggttgcagagcaagcaggagacaggccagtggttctcaccgacctccatggccagaatgcaaggcacacagtggacacagtctctagccggggacagcaaacttcagagacaggaaagaaaagctcatgactcaggtgacctgcctgtacacagagctggtaaatgcagagatgaaaaagcatctgtattcaggggagtcagacccttctccaaagggcagagatgcacggtgcgctgtggctctttcctctctacggtctgatgccacggctgccactgggcaggagaaacacgatgggaacggacatgctgggtgtgaggatctgagtggggtgctgggggtgcaggctggcaccttctgctgggaagaggctttggggtgcgtgtacctgcttccccgcctgtctcaggagcttctggaagcgctcgtcgtccagcatgcccggcggcaggtccgtctcaccctgggccttcaggtcctcgagcttctgcctcaggcccctgagggcctgcagctcatcgttgaggcgactctgccgggtcaaggaggcctgcaggtccaactccaggtccagggaggtccgcacggggcactcgggcgctgccctccggaggaccggctggcacaccgcctgcggggttagagcacgacaggacagcccccgctgcagcggcggtccctggatgggag

SEQ ID NO: 64261 - DNA, 803 bp, Bovine  19866881125925
  misc_feature (1)..(1): n is a, c, g, or t
ngtcagctgtaacaccaatcaaaaaatgaacactgggattctttcaaggtccacttacacacagatttttttttttcctaccaaattcatgccataatactacataatctgtggttaattgaatctgaggctgtggaaccttgaatacaagggccaactgtaaagttacacgtagattttcaacggcagagtggggagtgctgtcggcccccctaaccctcatggtgttcaagagccaacttcatttttctttttcaacatttcttacttagtcacacctgaaaatataagacatctccaggtttaaaaaaagaaatccaccagtgctttgtatcatgagtattgcatctttttttttccctaaaacaagcttgtctaataatcttcattatattagagggagcaaatatagattgaaacatttcattttctctctctctcttttttttcttgtttcctttcctttcacacaggcgggaactcagatcagcctggcggacctacccttttccagtggggttttcactctgtggtataacttgcttccttcaaagcaaatgccctgcaagaagaaagaagaggagactgaggactcggtatttcaaccaagccagccgctcgtggattccgtagacttggtgagtcaagtcttactgagacacttaggtctgcagcccctctgaaattaatctttgtgtaggctttgaggtagaggtcagggtcgtttcttttttttatccatgtgctagccaattgacccaggattatttgttaaaatacatctttccttaacgcactgcagt

SEQ ID NO: 64262 - DNA, 914 bp, Bovine  19866881250955
  misc_feature (1)..(1): n is a, c, g, or t
nacccaccgttcaggttcatctctacccgtctcctccatgaatcttcctgtgccagccacgctagatagtccatcggctgtgctccaaaacctcctggatgctctacttcacgtcatcaccctgcacactgcttcactccttggaaaggcatctttgacttttctcttcctccccccatccttacccatcttgcaagtcccttaactgctgcctccttcctgaagcactggccagtggccactgtgcttccttgccatctttctcctgtatcagaaataaccatctttctttgttctcgtggtactctgtccctctttgccttgaatggctcagacgttggtgcaaagctgtgaggagaggatctgtaacttcttcagctttgtactgacctcagtgacaagcagagaggcttacacgttgtatttcataaatgtttgagacattgtatttcataaatgactgttgagttaattacattgaatgagggtaggtttaatacagtattgctatagactagcatttggactgggagtgtggaactggcagatgtaaactgttatacgtaggacagataaacaaccagctccaactgtatagcacagggcactctagtcgatagcctatggtaaaccataatggaaaagaacatttaaaaagaatgtctatatgtgtataattgagtcactttgccgtacagcaaaggttggcacaaaactgtaagtcaactaaacttcaattttagaaaaagaatgtgtctgtaaaaaaacagagcacgcaaaaatccttcttttcacagagctcatgttctccctgatggtagccctttccccattgtccagattctaggatgagctggcccctcccttgaagccattcctgactgtgtcagcccaggttctttctcccagatttt

SEQ ID NO: 64263 - DNA, 885 bp, Bovine  19866881308624
  misc_feature (1)..(1): n is a, c, g, or t
natgtgtgcgccaccaggaaggactctgaagtcagaatgattggccaaagacaaccccgggaaactaatcccatcaccataaaacccaagaccgcaaagccacgtggcagagcagttctcctggtaagttctccttaccctgctgctctctgcctgggtggcttcttccaataaagtgtcttgctttgtcagcacttggctccttggacagttcttttccaagtgttagacaagagcccgctcttggagccctagaggggggacacccccttcctacaacataattgctctcagattttcctatcagatgatgaaggagagttttaaaacctcagcaaatgacagtcaaatgaatttccttttctttctttgtttctctctttctctgtctctctctgcctctttcctttttctttcccttccttctttccttccttccctcttttccttcctctgtcttcctctctctctctctttcttcctttctttatctctgtagcgttattctttgccctccccagactgagagagctgacttgtcatctggacaggtcttagaggagttctgtgattttgctcctgagggtgagtaagaggatctctcctcgcaagggatctgaggcgtgagttcagccccgctctctgccttgcgtgacaggatgctgcgtgcatgcctgccggaatccaggacaccgtcccgcgccctccacttgtaaaatatgtatttcaaactctatgtatctttcagcttaagccttcgtcaaagctgtagccagcatgaagaacttccccggagggcctcgctctaacacttctctctcccacagagaaagtaacctgctgtcaccccactgttcatgctcagctggcagagtgaatctttat

SEQ ID NO: 64264 - DNA, 1498 bp, Bovine  19866881331725
  misc_feature (1)..(1): n is a, c, g, or t
ntatgtgtttttaaaaatacttattgcctgtaaatggtcatcatcacctgagccttcagcaaactaattttttactggtggagggtcttgccttgaggttaatggctgcagactggtcaggacggtagttgctgaaggctggggtgactgtgacaatttcttaaaataagacagtagtgaagtttgccccactggttggtttttcctttcacttgaacacttagagggcactgtagggttatcgactggtctaatttcaatattgttgtgtctcagggaatagggaggccagaagagaggaagagagatgggggaacaccagttagtggagcagtcagaacacacacagtatttgtcaattgtttgctgtctgatatgggtgagagtcatgggaccccaaaacaattatagaataacatcaaagaagactgatcaccatcacacacacaacagaaatgaaaagtttgaaatattgggagaattaccaaaatttggtaattcttactttgtgagagacacaaagtgagcagtttttacctgataatgcttcatcaaggatgttctaaatagtcaggtgcttctagactctccaaaaccaaacccattctctagattcaaagctttcaaatgtctgccctgctctgactctggtgagggaaggttggcgtggcctactaggctgaagagagatgcccatccaaaagggactttacagaagtgatgactcaccatctataaaggacactttggagctcatttgcaaacttaacctcaaacaatttttgcagagatgtgtagctgacctgccaattatcattttggggagatggtgaagaacagggaggcctggcctgctgcagtccgtggggttgcagagtcagacacggctgggcgactgaacaacaacaacaatagttttcacaaatgatacttcttcattgcctggagattcgtatatgtatgacactggctgtagcagcagtaggagaggctgaataccacctttataatcctggggtgaatggtatgggcaagatggcaccctcaaagctgtttgaggctgcttgaactaattttgaagaacttattaaaaaaacattgtagcctagactatagaggcaagcgtggggggcagcctagcagctctcagacacaggcaacgaatcccctagaaactcaagtgctatgtgttcatgcttgttctgctaatgacatgatgacaccaagctgtcgtgtctgttcactccactgtacacacagatggtgtactgactgccagaatggtgagctgcaattatatatgtaaaagtgcctgaaatctggcaggcattctataaaccattaactaaatcagagaagagctacatgattccaatttggcttgtgcaaagaccaatataggacttcccaagtgactcgaagaatccacctgcttcatgtcccacctagggtatcaaaaaaaaaaaaaaaagaatccatctgccaatgcaggatgcaa

SEQ ID NO: 64265 - DNA, 1561 bp, Bovine  19866881415571
  misc_feature (1)..(1): n is a, c, g, or t
nctttgacccggccacatattaatagtgataaacacaatggggcattccagtgtctccaaaggatatatctcattactactgcgacactgaatacagtgtttgacagtcatatggaaggctgtggacatgacgatgaaacaattcatggagatggagggtgagcggtaacaacagtcctcacatttaaaatgtcacacttttttaaagagagctaatggagtgcaacctataaaaatctataaaacctataaaaaccgataaaatctcggaattttacaggccgaagaactgaaccaggggccctgctgttccgtgtcccgcatgcactccccttgggcccgcacctggacagcaccggacatgtcagacgtgctgggcggcctggagccctctgattcttacatcgtgtttatcaacaggttttcagcctcaactctggaatagcaggctttgcacaacaggattcttcatttgcaacatttggtctcacggcatactttaaatttctaccttgtttccttctctcaacgcactttgaagtgaaagtgttagtcgctcagtcttgtccaactctttgcaaccccacggaccgtagcccgccaggctcctctgtccatgagatttcccaggcgagaatactggagtgggttgccatttgcttctccaggggatcttcctgactaaagaattttggaaatgtggccgaacacgacttctgagtcagcactgaagacttgacagtggagatccccctttttttggcagggggagtggggtggtggcacaggttggacctttgttgctcagtgagctctttccctgaaagatctgaataaatggcccctgaagattcctgtatcttaacggtggagctgtgtcagcatgataatgctatttggctaaaagactccttacactggagagtaaaacttcttgtaactcaaatattctcgttcacagacaatcctcgtgcatccgataggtaactcagtaaatttatcgaagtagagggaatatagtttaaaaataaatatcaaaaataagtttgccacccaggttctaaccaaaggatatgaaaacaaaaggggtgcgatcaggagttgttctatagattctctaactgcatgacatttatgggttatctacatattcccgtaaagaaaattctacctaataagagagggcagatagctcctgagtgaagacagactcctcaggatgacctaccaggacagcacatttgaccctgagtacattattaaagcaacgcaaataagctttgttcaagaaatgatcccgttcatcaattccattatctgtactcctaatttagagataataaaatatattctgtggagagactggttcaacaattacatgaacatttctgtttacctgcccccatacaaaaaacgttcaatattatgcagtggtcaggttttgagtgagaacccactaacctctcaacatcccccttacaactatctctggagcacggtggttttccctctgtggaggtctaggggccaagagtgccccgtaagagcggaaacgggtgtg

SEQ ID NO: 64266 - DNA, 1053 bp, Bovine  19866881718209
  misc_feature (1)..(1): n is a, c, g, or t
natttacaaatcctgaagtaatttccccttaccttgtgcctttgttttaatatgtgtatctgtcttgtacattttgagctgatgtgtgtgtgtgaagtagaccttatatatctgctttcctttttttcagaaggggtagaagagccagccaaaaaacgagccatagaagggaaaaacaattctgcagttgagcaagatcgtctgaaaattcctgctaaaacatcaggtcagcaggagagcagctcaacctgttcgggttcctcttccaaatcacagagtagtgggaactcagctctgagctccagcaacccgagtcagaatagcagcgccacaagtgatggagagcgggcagttgccagccaaagcagcagcagcactgcctctcaggtgacagcggtagggtctggaaaagcttctgaaccagaagttccagataaacatggttcggcatcatttgtttcttcattgttgaaatccagtgtgaatagtcatgtaacccagtccactgattccagacaacaaagtggatcgccgaaaaagagtgctttggaaggctcgtccacctcagcctctcaaagcgtctcagagattgaggtgcccttattgggctcctcaggaagctcagaagtagagttgccactgttgtcttctaaacctagttcagagacagcttccagcgggttaacttctaaagccagttcagaggcaagtgtttcatcatcggtttctaaaaacagttcgtcatcaggcacatcttcactaacccccaagagcaacacctcagtgaacacaatgctgacttccaaaagcgcttcacaggtagctgcgtcactgttagcttccaagaacagctcccagaccagtggctctctggtctccaaaaacactgcaatagcaagtgtgtcccagctggcttctaagagtagttctcagaccagcacggcacagctgccttccaaaagtacttcacagtcgagtgagagttctgtcaagttctcttgttgcaagttaaccaacgaagatgtgaaacagaaacaaccttttttcaacaga

SEQ ID NO: 64267 - DNA, 1288 bp, Bovine  19866881142559
  misc_feature (1)..(1): n is a, c, g, or t
naaatttatgattgtagtttaattttattgctactgacccctttcttgaaaatgaactggcagatgccattagtaggttaattgatttaataatattcctatgaataagctagcacttctgacttgaatcgctttctcaattgattggtactctataatagtgttctgtaaaacatatagaaggagcaacaaggaactcagctttggattcttcagttaattcattaacgttttcaatttgctaagtgcatggcatttgttactaataattagacacatgcattgcttttacaaaggctctttaaaatgtagtcttgtaaaaatcaccctagaaaaaaagtatgttaatagtctagttgtgtgtttatttttcaaatgccagcaagtagcaccttccagggacttacaggatggaagaaatcagtatcagtcaaggtaagctgcagggcagtcttggttcaggaaaaggagaggaaaggggaatgtcacacagaagctgcaagacaggagctgccaccaatggctccagaggaatgaggagggccactctctgctaatttccagaagtgaaaaaatgtctccatttttcagaaaaaaacaaaaaaaaaaaaaaaaaaaagaagttttataaaataagattgctagtttagagggttaatgaatccattatttgtctgaaaaccaaccggtttctgactaaaatcaatatttatccagagcccaggctgaagttacctatcacctttatagaaaaattcctaagagtgggggattaatctaaagttttattataatcatccctattattaaagttgtattatttaatatttgtagtgaaatgttaaatgtttgacattattgtaaaggactgataatttcttctctttcagtttatgttgaagaaaatagtctgtctgtaatgtgttcctaattctttaatgttcttatttttttttacactcaatagttttatattctgtctaaatgaagtacaagatcattgattttttcagtttttgaaataaggcattaaatattaaatttatttatttatttttgactcaagaaaaacatttattattcttatgttttgacttgttctatagattcttttggatttttttttcttttttttcccttatctgttgtagagtttctgcaaagatgatagtactctcatctctattattctgattggtattgtttaaacgcaaaaatatttattagctgatctcaacataagaccagaaactataaaactcctagaggagagcataggcaaaacact

SEQ ID NO: 64268 - DNA, 979 bp, Bovine  19866881229666
  misc_feature (1)..(1): n is a, c, g, or t
naccccacagaatgtataatagcaaaagtagaattgtaacataaactatgaactttgggtgattatgatgtgcctatgcataaattggagaaggcaatggcaacccactccagtacttttgcctggaaaatcccatggacggaggagcctggtgggctgcagtctatagggctgcgaagagtcggaaaggactgagcgacttcattttcactttcatgcactggagaaggaaatggcaactcactccagtgttcttgcctggagaataccaaggaagggggagcctggtgggctgccatctatggggtcacacagagtcggacaagactgaagtgacttagcagcagcagcagcagcatgcataaatcatcagttgtaacaaatgaaccactcttgatgaggatgtccataatgggggaggctatacatgtgtggagaggggggaatatgggaaatctctataccttcccttcgactttgctggaaatctaagacaactgtaaaaagtaaagcaattatagaaaatttacgtgttccttttagctctgtcctaaggtgaaacatttaatatcacacatgaaataaatacctatacaaggtactatataatattcttccaagttttcttgataatagtaaatttgaatcaccctaaaagaacgaatattcataaagaaaatagaaatacagcctcaatttggcagtctgtcacatgtgaaatgaaacttctgaaaagacaggaaaataatagttattgaagcacaaacaaatatgacaccatctatgcaaactacaaatgacagctacttagccatttcactgcttatttttcttactgatcatctttaaagaaattcatatggaatatgcattatatagaaagttaagcaataaagtgattttgttaaaagtctttaacatcatgaaatgaaacctctaaaaaaaaaaaaaaaagaaacctctatcacatttaaataag

SEQ ID NO: 64269 - DNA, 1205 bp, Bovine  19866880397420
  misc_feature (1)..(1): n is a, c, g, or t
ntcctctcaccagggccccacctcctggcagctggcggtccccatgatgggtgtcatctgtgggcaccagctcattcacctgcccatccctgcatgcctgcacggctctttttctgtttttaggccacaccgagcagcttgcaggacttcagtgaaagtgcctaaccactggaccaccagggaattccctcttttcactgtctattctccccttggatgacctcaatcacacctatgcttcaacttagaggaggaaatcagctttactgagtagtctgtgcatgaataccaggtgctttattgtctccagtgtggcaggacttgtctggggttcagcttgtgttatctctgacttttcacaaccaagtcgctactactgtttctcttctatagatgatgattctgagctgcaggcaggttaagtaacgcacccacctgagacagagctgggactaaagtctgctcccctgcctccaaagctggagttcttcctcctgtatcgcagtgacaatcgaacgcctcttctttataccattgaactcgagttgaacttagcagaacccttatagattctaaaaacagcagagtctgactttggggtttgaattgaactagaacaaaattttttttgctaactcattcatcagagacacatgccttactctgactttgaggctctgcatgctctgtaattcactgtgattctaaaaattacctctggctccccaggggctctattttagaatctggtgtcctgacaatacaggatgactttaaagtcagagcgggaggatttatttgagagatctctgctcataatagaaattagaaataggcataattgttggcattttcttctgccctgaaagatgacagttacagctcaatcttttctgtgtttaggctctgggacactctagactgccgctgtaacatgggaataatggagctgagaaaatagaatgtggacagttggcagtgcttggtgatttgggtcctaaaactttggcgagcctttggtagagactgcaaatactactttgcagatctgaattactgggggctgaggggggagcccacagggagaatgcctccatcagtctcccatcacatactctgttggaaagcagagtgctcgatggctcttcaacacccgcatacagagcactggaccttctaagagagcagggaaccaagaccctaac

SEQ ID NO: 64270 - DNA, 2808 bp, Bovine  19866880485113
  misc_feature (1)..(1): n is a, c, g, or t
ntctagggtgtggtctctaataaatttcattctccctttcttcctccctttccttctctactatctctttccccctttttttccctccctatcaccccctctttgtctctatttttctcctccttctgtcctctaaatagatatgacttgcctgtgcaatgaaacactgttgaaactgagctatcattggaagttcatttatctaaacgcccactagattgtgaggtccttgagatctcaaataatgtcatgctccatgggtgcccaataagtgtttattaagtaagtaaatgaaattgtacctagtaactatgtgagctgagaaacagtaatagaaatagtggtctacaagaaatgtacccaatttacccaagagttggaaaaatgtaggtagtgtgcccaaaaacaccaagaccatgtggaactcagcgtccaccctacaaaaattttaagaaggaaaatgatcttggtgtttatgcccacctaaattaagcataattaatgagataaactacaacaaaagttttctcttaaggcactccaaagcaaagtcagaccaaataatgtttaattgcctgggtgttttattcaaacaacgtcattaacaccacttgaattgcaacttctgggatcataaactttatgtatacctgtcatcaaagtccttgaggggctcctagtttaaatgcgtttcactacacaatgattatatgatattaaagaaaggaatgagttacttttcagttgctgaaggataaaaaaggttgttggtgtgagatgagcaatttatgtatcatgatcaaagagatgcttggctctttgagaatattttatatgtaaatgtaatctcccttcaacacatgtttaagttatgtggcattccactgttaatgctatcagaatcctaatggttctcaaaaaacacaattgtttcaggaccccaattcaaactctacgtgaaatactgatttttaaaaatctgtcagaattgacagccctcacatcctggaaacataaattagacaatttggcttgaagatgaggccagggaggaacgtttctctcatgttattgatggatgtcccaatctgtcttcagattaagcagatacgcttccagtttattcatacagcacatttcacacctcctctgtgtcgtaagtttcaccttcttcttacaacatattgtatcaaaatgcatcactgaaattggttctgttataaactgtttaaaaatgacaaattctaaaattggattagtactgggcactattcataccaaaagatgttgatgaaagatttccatttattgttgcaattactttacaggaaaataaactactatcaggtatgatttttctgtgttaatctcacttccttttgaaagatttggatccctcctccctttaaaagctcattatgattttgcaaaatatatttagtccataatccatttgatatttacaattcaatcacttttaagtattcttagcagttttgtgacaccaattattctaatacaattcaggacagatgttggctaaagtgtcaaaaatttttttcctttgaaaacataagttattatcatttcaaatgtgcccctgagattctttccagaacattcaattctgtgtatattcggttggcaatgctgatccatcatcagtaggaaatgcactgaattattctgctcgctgtgaagaagggtctgtaattaggcatttttgctctctcaaaatcttgtctttgccaaagatgttcagggagcgtagctttctctcagcaatgctacccgaacaatgcagtaactaaattcatcactgaggtcacattggtaccatgctaataacctgagttaccaaatcaagacactttctattttggacactcttctcacaggtgccatcaacagacacccagttaaactggctcggagagaattgtttaaaaaacagttcaaaacagagaactgacgggctcttgggatagctattcagtctgagggcctgaattcactggctccacacagaatgtcagggcaggtgcctcaccctctaatgtcccagcaccgactttctctgacttcattcacgggcaggacttgttcacagtagggtcccagctacaggaggcttacacacaccaattagccacacaggtagaaagagagtgtctctttccagattcctgggcaagactttcatacgtccatctttgaactgattacagagcccgtgggatggacaggacacccttaccggccagggacaggtgagtttcagcaggtgggggtgagtccctcatgaactacgaactgagaacaaaagaagggttgttcccccaaaggaagggtctgtgtgcctgcccaggagacagaggagtagggctgggcccgctggaatgacagccatgcactctgtcctccatggatggcagacgaggaagaccccacgtccttcggggaccctcaagttggtaccaaagaaagcacagcgaagtcccccaacagcagaaagcacacgtggctctccgtgaggatgcaggttctccttccctaagtaattacagaaacgactgagagagtggctgactcttctagccccatttccttgccggtttcataaaattccctggactaggcatcggacataagaggcttcaacagtgatgctcccactgaaacgcccctcagtttaaggttttccagacttaatacacttggggtccactcatttgacctcttaactgagcacgggcataggcagaataataatccgagtggcccagtataattctatccttagaaaaa

SEQ ID NO: 64271 - DNA, 866 bp, Bovine  19866880498973
  misc_feature (1)..(1): n is a, c, g, or t
naggtgaaccttgtgtgtatgtaggttgccttctttgttcacttaatatatcacaagattgtctttatgttacactgttgtatgtggaaacaacagtgccaggtagaaggcaggtgtataatgaataaatgtgtgtgtgtacgcacgctcagtcgtgtccaactctttgcaaccctgtggactatagccctccaggctcctctgtccatgggattctccaggcaagaagactggagtgggttgccatttcctcctccagaggaatcttcctaatccagcaattgaacccatgtctcctgcattggcaggcagattctttaccactgagcctcctgggaagccctgtaataaataaataggttatggaagatatattgatgttttgattccatcaaaaccaagctattaacttttgagttttgcagtgaccttcaatcttccacacagggctttgggttcaggtagcgcacaggaaacatctgggagtctgcagacagaaactctaagtacagctcttcaatcacaattaatgtcgtattgcatacaatttcttgacagcatttattgtaaccagattccgtggctatggctgccattactcctgccttttttctctattcagaaagcatcttctctatagggccagaattaggtaagtgtcagcagcctagggttgcatgctattgtgtttgtgctggtttttttttttttttttttttctgttggtaattactgaacagaggatgagatggttggatggcattatcgattcaatgacatgactttgagcaaactccgggaaatggtaaaggatagcgaaacctggagtgcctgcagtccatggggtcgcaaagagtcagatatta

SEQ ID NO: 64272 - DNA, 2142 bp, Bovine  19866880501194
  misc_feature (1)..(1): n is a, c, g, or t
nccccaggcctcattttattttgagaatctcatttgctatggacactgggcataataaccaattttattttacagctgagcacatctcggatacattatgtttttctcaaaactgtgcttgcacattaagcagttgcattttgacctcatccatctcctcctggtatcttatcatatgtatccaggaccaacaaactgacaccatcattctgcctgggggtttctttaggcaaatccaaaagtttactagtagcatttcctatcttccaggttattagagacaacagttgtgtacactgttggggcactgcataatgccacatgccattacccacatcgctgatgaagttttctcactgcttttctaagccccactaacagttggtttgccactaatccagcttctactgaaagttttctcatcactgtctcctctttttccagggcaggatagtttattcaggtggtaaccttgagtgatggattagtatctccccagggataaggagcaggcttgcttactgcttgctctaaaagcagtggattccccaagctcagtgtttctcagctgcattccaaacccactgtgtagagagcgctcatctgggctgtatcgcatcacccacacaggacccaagggcaacgagaactgaagcaaatatgctgatgtgcatgctgcttgctcttccatgaataataaagtcccacatctcagccccgggaatctttgtctactgccagcactcagaaaacagtcacaggctcgataattcgcttgtaagtaggaaaaaccaaatctcagatctaatagtctccatctccaggaggcattctcagtttaattttcaataaaacttaagttaacactaccaaaggctggccatgacctgaaaagaagtctcattttccaaagataaaagggggagtgaaaagaatttttttttcaaagttaagaactatatcacaattcagaactgaaagcaaatcctgttgacatctctgtacccatgttactttgtgtcttcagagctggcctggcctcagatcaaaagacaatattacagcattgttgaaaattgtgtattctcttcaagaaaatgttctcttttaggccatttatcaatccagcaacagaaaaattccaacaactggccagcttcaatgatttacataatttctaaacaaacatagtcatcttttaagtactttttcgaaaacaatttcttggccacaccatgcggcatgtgggatcttagttccccaatcagtgatcaaatccacatgcccttcattgggtttggagtgtgaagttttaaccgctgaaacaccagggaagtcccacgtaagtctttaactctgtgatccccaaatatgtctgtcttgtaaagcaataagtcaaaggaagaacaggggtatcagaagtgggaaaaaaagatcaatatcattcatacaagaaagacaaatactgcatggcatcactcagatgtgaaattttaaaaattcaaattcatagaaacagagagtagattggtggtaccaggggttggggggttgggagaaatggggagatgctggtcaaatggtacaaaactccagttgtaagatgaatagatcttaagaattagatttgaggatataatgtgcaacctggtgactatagttaaccaaagtgtattgcatacttgaatgaacttacttacaaagcagaaacagactcacagactttgagaacaagcttatggttgccagggggaaggatagcagggaggggatagttagagagtttgggatgggcgtgtacacactgctatatttgaaatggatcaccaacaaggacctactgtacagcacagggaactctgctcaatgttatgtggcagcctggatgggaggggagtttgggggagaatgactacatgtatatgtagggctgaatccctttgctgttcacttgaaactatcacaacgttgtttgttaatcggcgatatcccagtacaaaataaaaagtttaaaaaagtgtattgtatacttgaaagtttgctaaaagagtaagtgttctcaccacaagagaaaaaaagacttaaaaaaaactatgtgaggtgttagacgtggtaactaatactattgaggcaatcatttca

SEQ ID NO: 64273 - DNA, 1805 bp, Bovine  19866880655840
  misc_feature (1)..(1): n is a, c, g, or t
naattttcatctggcagccttagcagcatgtatatttcactggcaaccactgagagattgattatacaaatggaaaatggctataccatatataaatagagaaccctggctgataagctgtaacaaccgggcctaggacaccaagcccttagctacaataaacaattcaggaagcccgcctgctggaagtcagacttgcaggaagacaactgttatctttagtaacaatccaggaagccaataataccccctgtaacaatcaaccccacagggccaggacctgctcagtacctgacagctcccttagattctgtccctgcctccgattcagaacgaacaagtcaaatacatacccctaaccatcacacaggatgccgactgctcttgggcctcctccagccttcccagggcagccaccaccaacagggcacatctgaagccttcccttttctccactacacccctttcccactcccttgcctgcctttgtgtctctgctaaaacggaagtgagagtggctgattccctggttgtagcaagctctgcatagtctttgcttttcccatttggttggtctttatttccacactgcagatggcaggcctgttcaaaaagactttctggatgtacgcaaagcaggaatctcttcagtgtcacttcttcaaaaccaataattaaactaggtcaataatggctcatcaaagactcagaaagtcaggtcagccctgtggcttctgtcatccaccttctataaaatcggtgtcaggggccatccagggcccatactcactgagccatgagtctaacgaccctgacagggcatagtgggcagaacacagggccaggatgcagagacccagagctcccaagactccgtgatgtcatccaaggaatgccacctccaaggtcatgccctctgacagacacagtgtgtatgggatgtagctgtcactgtggctaaccacccaacgccctacaggttcttagggtggagggctgtgagagtcaagccactgggcagggatgagaatagacctgtctaaagctggctttggatttggccccttgcagggtcccaacttggaaggtccctatttggagagtctgtgagcacaggagacacattctgaggacatgggctggcaaagggtagcctctggcctccatctgggggtcggggttgagtctggggaggggagactgcaggcagcctggcctctctaccttgctaccgaggtggcactggcgatggacaagtccttcttcaaggagtgctctgctcggttccggagtcgcctcaaggctttgggtgatgggtacccaggagaacaacagaggatccaaggtgaggagggaccaggtggcacccccagctaccccactgtcagcacctgaatccacaggcctgtctgcccctacctgtctgggagcgttctttgtcacactgaagggttgaggactttgagtcaggaaacctgaaaccaaaggaaaggatgtgagcttttccccaatgaccaagaggatggctcaggccaggcactgggcaccatcctggttagcccacaatgccacatgaatctgcccaatcgtgagctccacttcagaggaggaagctgaggctctgaggggagaaagaagcccctgcacaaggtcacagctgttagggtgggctcacatggggactggcccctgaaggcttgggccccactgttcacacccgggccactcactgcaggatcctcttgaccacctccacagctgggtcttcaatcatggacttccccatgcggcttggctgggcaaag

SEQ ID NO: 64274 - DNA, 1365 bp, Bovine  19866880695910
  misc_feature (1)..(1): n is a, c, g, or t
ngggatatgtgtatacatagagtctgattcatcttattatacagcagaaacacaacattgtgaagcaactatactccactaatgaaaagacttaaacatgcttatttgtaccagctatatttgtaatagccaaatacttgaaattcaaatatttatcaaacggtgactggatcaacaaactgtggcatatccctacagtgcagtgaatgtgaatgaagtgcagtgaaagtcgctcagtcatgtccgactctgtgatcccatggactatatacagtccatggaattctccaggccagaatactggagtgggtagccattcccttctccagggggtcttcccaacccaggaattgaactgtggtctcccgtgttgcaggtggattctttacaagctgagccactagggaagcctagtttgttgttccttatcaataaggagctccttatcaattaataaggagcaacaaaatattgataaatatgacaacatggaagaatttcaaaatcactatgctctagtctgggaaggctacatactgtatgatttcatttttatagaattctagaaaatgcaaactgatctctattgacagaaagcagcatggtggttacctggcgatgagagggggaggagaggatgaagctggcttaggtgtatgaggaaacttttggggataataagatttccttatcttaattgtggtgatggtttttttggtgtgtgcataagctgaagctcatggaatggcattgcttattaaatatatgcagcttatgatacatcaactgcacctcaataaagctgttatgaaaccagcattcataaagcagaaggcagagcaggatgttcagtgtttcctgatgctcctggaaatttcatcaagtcgactgttacctggactgcctacatgcaagtatggctctatttgggtgtagaagaatagctaattagagcccaggtttcctgtttgggagacttctgaacatgcaatgtgtttatttcagatgggctaagtatttccacatcaccttcctgtacccagtcctcaggagaaactgacagtaactttggagttaagttccttattcaaataccaggggatcaggtgtgaggcagcttagagctcttaattttaatcttatttctcccccaaatgaaatatataccctgtgttgatgctttggaacattgagaagaacacagatggtaaattgaatttgggggaggaggaatggtctatataactcctaaatggcaacttcaaaacactagatggctccctctaatggggttttagattggagttaaaaataaggctcctcatcagaattattgagaaagatgacaatcatttttcaagcgat

SEQ ID NO: 64275 - DNA, 878 bp, Bovine  19866880726777
  misc_feature (1)..(1): n is a, c, g, or t
ngtaactatactccaataaaaattaaagaaaaaaaaaaggcttgaactcatagataatacaattctgtgcctttggagctgaactgagataaatccttgaccgtgaatgcaaacacgaagtgcatcagtgtgttcactggagcatcatttgtaacagcagacaattcagtacaatctaagtatcccaccctttacagcaaaggctgtaagcgatggtatatccattcaatggaatagtatgaaactgtgaaaaggaaggaagtagactctatgtaccgaaaaggaaagatctcaggatataggtgtagtgtgtgggtggagtatagggcactgtgttgcttcttcacatgatcatatttcaaaaatatgtgtttgtgtgcacatacacacagacttttacaggaaggatacacaagactctggtgctggtggctcctggagggagagggagagagaggtggcctgcactgcgcactctgtggacctgctaatcatgagcacacattactttcaaagacagatcatcaagggcttcctgggtactttttctggtgtacactttcgtcaggcccagaaaggtcccaattatttccctctcttaagtcgaacagatggtaaaatagcaacgtctcatggacatcacctaccgtgatcttcttgtggtcgggaaactcgaggccaaaatagtctccttccacgaggttgaggtggttgcacacggcatccagcagcactttcccgggggctctttgctgggaacaaacagagcagttgttacggcctctgagacaggcagctacggaaacaaaccacggctcccaccgcaggaggcccctcatgcctgggtctgtaagagctccccacccaccaccccacaa

SEQ ID NO: 64276 - DNA, 814 bp, Bovine  19866880780188
  misc_feature (1)..(1): n is a, c, g, or t
ntttatgggctccctcataaatgccccggcctagtctgcctttccagtgttctgaggaagaaactgctaggctcacattgctccccagcagaggaggtgcaactattttcttcatgaggacgtgctttgatgtcgtccttgcagagggaagggaaacagaaggaggaggaagcggggagggagatcagctccgagcaggaggctgaaggcacacaccggagttgaggatgacgtgtgactggctatgattttgacatcaatcaatagattgtcactggcctcttggtgacagctgctctattcactctgcacctccccccagccccaaacagaactcagtgtggggctctgaatggcagttcattaactgagcaccccccaggctctgtactcaatgagatactgttccagctcctacagagtccatcctctgaaggggaagagaaatggacattgacgaccacctgaaaaaaaaagccacacagttctattgaccagacaaatataaatccgtacacactcatacacgcaaacacagttctagtgaccagacaaatataaatgcgtacacattcatacactcacttttctgccccagctcccacttcccgctactggagaattagaaaagtatgtccagacctttgggcagatgagccccgagccccacaggcccggggttctgctcatcacagctatccagagaggccctgttcactgcacacattttacatctagaatccaagggaagaggatctggggtttattctggattccaaagagtattacggtagcatctctggatattttgata

SEQ ID NO: 64277 - DNA, 1593 bp, Bovine  19866880803688
  misc_feature (1)..(1): n is a, c, g, or t
ntggcctagtggttaggattctgggctttcctgctgtaacctgtttgatccctggttggggaacggagattttacaagcagccaaagaaaaaaatcaaaatggtaaattttatgtgcatatgtgttgtgctgagcttagtcgctcagttgtgtccaacactttgcgaccccatggactgtagccaatcaggctcctctgtccatgggattctccaggcaagaagattggagtggattgccgtgccctcctccaggggatcttcccgacccaggaattgaacccaggtctcccacactgcaggcagattcttcactatctgagcctcctggatattttaccataattaaaacatgtttaaactgaaatgtaacctctctaaagtaataaaattgtgactaacagaaaaaaaaatgcaataatgatatatgaaaacaaagcctgtaagtaactaggaaagcgatgagctcagctcaaagtgtggctaaaagataggagagagagattcaacacagcactgttgaaagatggtagcaaaagaaaaagaaattaaaaagcttcttcatgatttactccctctaaggacagtttgttccatgaactgattacatggactaatttttttcctcacaacagttttatgaggtaaagtggaaagatatattttctgaagaaataaactgttcttaaatgatacattctggtcatccatcagaatacaccaattccactgatactatctgtgtagatctttgggggccaggcctcccttctagtgactgttgaagtaagattcaaagtggcaagcttccaggagaggagatactttgaggagaaggacttttctagctcctaataagggtgttcttgttcagttgctgagtcttgatcaactctttgcacctccatggactgcagcacaccaggcttccctgtctttcaccatctcccaaagtttgttcaaactcatgtcgattgagtcggtgatgccatccagccatctcatcctctgtcacccccttctgctcttaccttcaatctttcccagcatcagggtcttttccaatgagttggctctacacattggtagccaaagtattggagcttcagcatcagtccttccaatgaatattcagggttgatttgctttaggattgactagtttgatctccttgctgtccaaggaacactcaagagtcttctccggcaccacagttcaaaaccatcaattcttcatcagtcagcctcaggtggatataaggtgcaagaaattgtttgatcatcaaacattcatcaaccaaaacctccatccttctggcaggaagtgggttgagatattagttggtctataaatccaatgaagttccaggtgtgatgacttgcattaatgcacagagctggctagggtaaccattaatccactgtgcctttatatcatgatttatttttcattatctttgcccactgtctcaaatcctgagacttcccttggtctgctataccaagttacaactattacctcacttactctccaggtctatatgaagtactttatgaaataagtccgcagaattcatcgctgttattactgttgt

SEQ ID NO: 64278 - DNA, 1846 bp, Bovine  19866880841160
  misc_feature (1)..(1): n is a, c, g, or t
ntggggaactgtgcagcgctgtgtcgctgtttagcgaatgggagggttatcatgaggtgacaggatgcgctgtggcgcagaagctcccggaagcatggggtctgggtgctttactcacgttaaacacagctgcctttgtgcgtaatgaggacagagactcaagtctcagagaaccgttaacagtgaacacctctgaatcccagttaagggcctttcagtttatacatttcagatttgaactttttaaaatatgtcaagcacaatcactttgtaatataaaacacaaaaatgacaatttttcttattgaaaaaaattacatggttcaaggctagtgaccaagtatttgttaaattataaaaacaaatactgacatggcttcccctctgatttgtacaaggcattttattttttttaaataaaagatattagatgaaggaaaattaaaccaaatacactaatatttcataaacactgcaaatactggtacgttaaatttgaacttaggtatttctgactagggagtaaaacaatttttcctagaattaaaaactttttcctatatactgaagctaataattctgaggagggagaatagagcaataggggcagtatcgaggaaaaaacattctttaccgttaagactgagtgcttctaaagatgactaagtagtattttatcaatatgagaagtaggttaaacagagaatataaaaaggcaaagactgactttcagacacagtctaagtcaagctccactattccagcatttcaaagaggtaatagcttacggttctgaagcatctgcataatgtgttctttgatcattggcaggacgagctttccaccgagtccacaagccatccggtctagagcactctcaccagcaaccgcattgctacacagagaacaatataattgacatacggaaacacgtaaaaacaggacactgcacggacgtgtttttaaaccgacactgaagaagaatagctcaagtagtattttctaatatatgtactgaagttttgggttaaaacccctagaatttaaaaagtggcggggggtgtggataaaatttttatcatgcctcatcaatagtttaaaagtcttatgtctgaatatgatctttcacgacttccctctgtccccactcactggttaaaacttagcttctgacactctgaagactcagagggatcagcagtgtttaggagcgcctctgaatcacatttcctggaaatatagtcttcaaacttatcagaacacagaaaacagaaaagggtgctgagcctgtatgtgattttctctaaactgggagcttattcatcttttaaaggggtgcaatctgccctataaaatattatgtgtaagtgaaactcaattacagttttttcactgaaaatcgaaggaatttgggcattaatgcctttgcacatttattgttttagaacctcaagattagcagttgccacgtacatgacctctaactgctctgtgaaggtaagaccagaaagacaacactatgaccttgaaaacaggctcttaagacttagcctgaccttgaaaatgtatttatgtcctacttactcagagataaaatcttatttatctagttcagaaaaaaatagcttcttaacatcacatacaccttagtgccttttacagggcaaattaaaagccaggtagcaacacatcacagtaactgaaccaggacaaggaaactcgaccagagccccgtctcctcttcagccctatttaggtgtttccagtcaaggattattttcatatacttctatagggtattcaggccaaaagtcagttatttttaagacaggatcaagcttcaaaa

SEQ ID NO: 64279 - DNA, 3804 bp, Bovine  19866880842672
  misc_feature (1)..(1): n is a, c, g, or t
nttccaaaaacaagggagaccgaacgtatgtgaaagcgttagtggctccgtcatgtccaactctaccaccccttgaactgtaacctgcgaggctccctctgtccgcaggatttcccagggaagaatactggagtgagtagcgttcccttttccaggggatcttcccaacccagggatcaaacccaggtggagtctcctgcattgccagcagattctttagcatctgagccaccaggaaagcccacaggaagaccaaggcaagcggtaaagcgcatccaaggaggaggcctgttcacagaatgggggccgccaagtcctcaggggaggtgtgagctttccagcagttgtgatatactgggtcctctgtgctcttgtgaatttcttctacctggcatgataagaacataaacatttgtaatacaagacctttttgacaagggtcattctctgacccttttatttaggaaagaggacttctgctttttttttgcttggggaatactgcgttaaaaagaactttcgatctagccagtctaactttttccttatgttgagagtgcgattttaataaaagaaatttctactccccaccacgttctccacccaagttacagtcctttgatgagacctaaattgtttgacagttgaaatgattgataccacagcatctcaggggaggaaggaaggtaaccagatgaatgtctaccaaagatcacagaagtcctgtgcttatacctgtctttgagcattagagaaggaaaagaccaaaggaagcctggcgcaggaccattttttagtgacggtttccagtggtggtatttaaaaaatttccagtgggaaatgaaccctttagttacccgcctctgtcctttcagtgacatatgtgatgtttgacagctccttcccgggtttcttctggaagtcttcaaaattaagcagggtttataggctgtgttgactttcttgaaaacctgatttttggtgattatagttttcaagcctttgagtgtcaggtaggcactgataaaagagagacgagtgtgtgtgtttgtgtgtagtaaatagtatattacttgaagtgtacctgtgaaatgtacccatccaaacatgggggctatccattcacttaatggaaaagctttgacactggggaaaagaaaatgagcttaaaccaaaccagaactgagggaggtggttctttaaaatgtcatctcaagtcaccttgaagctattatgctaaaatctggcactaaacatattttggatacttcggttctaaaaaagttttctgtaatgccattttgggggtttgtacatgatttttttttttatgttatctgttaatactttaagttgtgaaatatggcatatttgcaaatgaagctataaaacgagcacatgtaatttaataaataatgacacaaacatccaagcttatagtacaaccttcctggtatgggccctcccccattgcttcactctctctcccagaaataatcacagcctggatttcctgttaatcattcctttgcttctctctatggtttggcgcacatgtgtgagattctaaacaatagcgtgtttgagtcgtaaattactcatttcatgtctgtctgcccagttaactctgagaagaggaattgtgtggattctggtctctggtctgttcctagcctcaagcatggcccttagcacatggcaggggtttaataggcatttatggattaaattaatgaatagagatgttttattcttgtaaaaaaaatagtttctcatatatggctaagatacataaatgtgtatttgaataaccataaaagatagagaatatcgaaaggttttatgtgaacatgagttttacacggacggctgtcagaggatcagtcccacatgcccatttactaactagaaaagtgacgaaactagaaaagctctcaaacagataagagcgtcactcaatgtcatttagccagtggtggccaaagtggggccagaatgtgcatctgctcccgctggcccaggagtctgtgaactgggtcacggggcaccctctcagtggttttgttcaagagagaagtggctttcttcaatttaatagcaacctcacccctggggaaagaggcgaacacaactgcagaaaaattcctcaaattcagtacattagagtgttcatgtaatattcctggtcaactaagaaagcagactagattggaatcatcaaatatgtatatgtagttttagtaatgttaatagtctgtatactattattaatagaaaactcggaaagtttaaagagcgactttattgtggggtgagtttttcgaaatacttgctgaaacagataggtgcttgatgaaagagagaagagtgtgtgttttcatttgtagtaaataatacattacttgaaatatagctatgaaatttactgatccaaacatggaggctatccatcgactgaatggaaaactttgacactttgaagaaaaaaaaatatgagattaaaccaaaaccgaaactgaggttgttggtctttaacatgtcatctcaagtcacctcaaagctattatgataaaatctggctctatatatgtcttggatactttaggttctaaagtagcattctataatgctgattttgggggtttgtacatgcttttttttttcttacgtagtctgttaaaacttgaaattgtgaaatatggcatatttgcaaaagagctatatataaaatgagtacatatagtttgacgaataggaacacagacatccaagttaagaacacagccctcctggtatggcccctcccacattggtctgtccaagctccttgattattcagtgtgagaatgacaaggctaaaagaagatgagtgcgtgcggcatcactcaagaactgcagatgtcagatgtggcccttatccagttgacatcagatggtcttcagtagatttcggtataaggcttgtgacctgagtttttgcttgttttccaaaagatggcatttaccaagggcagggtctgggttttggtgtttggagattcttctgacctgcctcccaccgccccaaccctccacacacacacatacactcgcatggtgattttgtcacgtaactttgacatgaacccaaagttgagccattagtgcccagcaaatgggcaagagaggtgtgatagcagctggcaggctggctggatcccttgggtaccactgaaagctcagtgcttctgtgttcacaggttgctttagaatgtgccctccaaaaataccagccatctctgtactttaaacacttctgaagacttttatccttcataactggcccacttagtcgtctgtgccttctaagggtctgacattgtgtgtaagtcggtgttaaaggaagtgtctggtattggggtttaaattatctattaagcccactctcatattcaagtctatgactctctgagccctggtgataatttatacttcagaggaagctcataactgcctcagagtctcagggtattatttttagaacctttccaaatagcttgacaccaacattttccaactggattttggcaagcgtcgatccccgggattttaaagtagctctttatcaaaataaaaccagctacttggttatgagtaggtagaattccaaaggctggcacagataactgcgagtgtggagtgtgatgaattaagagctgcatgttgatctaggaggcaacaaaagcgattttgaagccgagtttgttctttgttacttgcaaagaaacgtaagtttccaagcttggaaaggggcttagggaaaaa

SEQ ID NO: 64280 - DNA, 1588 bp, Bovine  19866880849244
  misc_feature (1)..(1): n is a, c, g, or t
ntatggcaggcagtctcctgcactgcagatgaattctttattgactgagccaccagggaagccccttactctcccttacttgtctctaaaatttgttccttacactcagccccacagaccataccaagaggcatctgtgaattctcccctaaccagtcttagagcaatcctataactggctggtctttctgcctccctcagatctccccctttcaacccacccttccccaagaccactcactgatggatgggtggatggatggcttgattgatccattcagtgtctacccaatatcttccctattccaggcaatttattacgtaataggaacacataggtgtttgaagccaactcaatccctgcccttagggagcttaaaggtttagggggaagaacctgacatttaagtagtaagcagcccaatcaagaatgatgagagcattgtagctgtgtttatgcatacctgagcgtgtcattcttcactggtttttcttcgtctttgggataaaacccaaactccttagcctgtacacaaggcccttcatgaaccaaccaggagaattaataggcttacagatcccccaggctcgctgcacttcttgggtttcctgtctgtgcttcttgggaaatggcttgtgcgtcttggtcccttgtttcttgagcaaacttcattgtggacctcgagctgtgactgtgactgcttgggagcctttcccactttcctttgtgtgcgtgtctccctcttgtgctcctgtggcctctctgtgtctcctcgctgatcgtttcacctatagaatttattttctcctccagtagattctgagacccttgaggatggaaatgatgtcttctatccttggaatctaacatgacatctagtgtgtaacagatgcttgataagtctaacggtaagagctgcctaccagtggaatcattgtcccaaagtgggtagcaccatctggtttccataagtgtcagactttataaacccctttcagagatctgacgaatgaaacctcagtattcggtgagatattcaaacttcatgccatttaaattctctgattctgaattgttgtccattatgtaattatttatctctgccaagctcccaaatgtcttaattgggcccatcatatgttatgaattctatttctgggtgttgtaggaattgctgtcttaatgttattttgtttttccgtacatgagccatttgactcagtgggatgatattttataactcattaatgtttgtgatcctgtgtacccaaatattcaggattagttgtcagctaccactggaattgatcccatggaccattagaatgtacttttatgctgtaattatcctatgccaagaattaagcaccatgcagccagtgacaggcgggaaccacatgcttggcctggtaaatgtacatggtggcgagtaaatccaactggatctttctttctccaaagaaagaactttaatgtttctttggctaacttaatttaactctgagttaaattaagcacagcacttaattaaattaagcacagcataggaaattctaagagattttcctcctagaaaatgggaagcaa

SEQ ID NO: 64281 - DNA, 1612 bp, Bovine  19866880975434
  misc_feature (1)..(1): n is a, c, g, or t
ntgaggacatcattaaggaatacttcagaagccatcgtggagatgcgttaacctgttcttgcctctgaagtaacctgttctccatcatgctatttaatcttctcccttggaaatgactgctctgaaattttcctgatgaaaaagatgaaactagtcagattcactgttagggttctttccattaaacttgactggaactcatttcccagtttacttttgaaatgcctgtaagtctttttgaacttcaaatttattttagaaaccattctgtagtatctaaataaaatttatgtaaaggaactgttcttaaatgtatggtttacatgggaagaaactgcaaaagctaatcagatttcctcctactggatttaaaaggcagttgattttagtgcatgatcattgtataaggaaggacctaataacagaatttggtattgggggaagggtatgggaaaatatatgagtgcttgagtgattttctattacaattttaatttataatggttttcttctcttatttcagtaatcacccaattgtccttggcccaaacaataccaatctgcccaaaatattcagtataatcgcagaaggagaaatgcatgaggcaattaaacatgatgatccttgtgccaaacgtctggccaatgtagttcgccaagtacaggtaagctgatttagttaaattgggaaagaagaactaaaatggttttggggttttttgtttagttttttctgtattttttctattagaggaagagagtagaaattcaacaagctaaggaaatttcacttttatattatcttgtcatcaagcctcaaatagattatacttaatataatctatccatatattctcattatctattaaaactgaaacctttgtcttaaatctgagattagcacatactcattatgttatttttctgtatatatgtgaaaacagaaaggcgagacgttaatcgtagtaactgtcagctaccaatgttttataatcaagttttcctccctaagtggatgtgtgtagataacttgaacaggtcatcaaaagtgtagctttatcaatgtacaaatgagaaagcttactgtgagtgaaacatacttcatagaaatgaaaagatgtcttgcttgtacaatggtgttcatcaagctaatctactggaaagagtactttgctgttacagtctgcctaatgatggttatgagggtactgcccagtaaccgttttgccaaatctaaacatgtgacgttgttctttcctagacttctggaggactggtggactgaatgcatagcgcagctcagtcccgagcagcaggcagccatacaggagctcctgaactctgcctgaagggccttactaccaccaccagataactaactccaaataaacgtttacccttttgtttaggtttctttgttttgtttttgagcaaaagagaacggtagagttgtgtgtaggccattcttctgcaaagccacaacagcagaacgagaagccctgggcttcaggatggtgtgtaagtggatttccccccacccgactactgaggaagtcccgtgagccctgcagtaacactgaagagtatttttctattggtgtgacccacccat

SEQ ID NO: 64282 - DNA, 1899 bp, Bovine  19866881016256
  misc_feature (1)..(1): n is a, c, g, or t
ngcctactttggcccctgatgtgaataactgactcattggaaaagacctgatgctgggaaagattgaaggcaggaggagaaggggacgaccaaagatgagatggttggatggcatcactgactcaatggacatgagtttgagtaagctccaggagttggtgatggacagggaggcgtgctgcagtccatggggtcgcaaacttctgctcatggttcatgggccagaactgaggacatggcctagcttcaggagagactgggaaatagaaaagatcttctgaatatttggtgagcagaaactgtctcttccattcttggctcctttgtgccacctcatctacaaaatgataggattaaactgggtaattcttcagggccctgttatacttgtaaatatctaagaggctatgactaaccacatggccatgatttcagagtaagtattcaaacttgtccttgaagtatagttctacttttaaaggaagtagattagcattatctccactcactcactttattgtcctaaattgaatagtctcactccttttactagaaaaacaattccttatttttagagaaagaaatagacaaattagaaagaagtatttctctgagctaaacttctttcaaaacaaattcttcagttggaagaatttaagaaaattgttatcatttattgtcctaactacttctcacgcagatgatgaaaaagatctaccatatgtacaaacaactcatttttcaccaagaaaaacacttatttgacttcctatattaaaggattagagagttatttctaaattagtgctgaattctcaggaagtaagcaattttaaatgaaagatacaagagagggaaaattcaagcttgcttcttttttgtttcaagatacactcatgaaaatgtgcaaataaagacttgaaattccaccctcgttctctgataattaagatttctggcagcttggtaaaggactgtgagcatctattctttgatgatagcctatcacctgccttggtatgaaagtgaaaagtgaaagtgaaagtcactcagctgtgtccgactctttgcgaccccatggacctattcagttcatggaattctccaggccagaatactggagtgggtagcctttcccttctccagggcatcttatcagcccaggtatcgaacccaggtctcccacattgcaggcagattcattaccagcttagccacaagggaagtggccagtcatatcagtctaatatataggccagtgaaactccagtactttggccacctcatgcgaagagtttactcattggaaaagactctgatggtgggagggattgggggcaggaggagaaggggacgatagcagatgagatggctggacggcatctctgactcgatggacgtgagtctcagtgaactccaggagttggtgatggccagggaggcctggcatgctgaattcatggggtcgcaaagagtcggacacgactgagtgactgaactgaactgaactcaactgaattctttaggtcattcagatctatgcaacatctgtcgtctttttttgttctatggagagacagaaacatttctgaaattcctcttttggagaatcatttatttaatgaggacaaccaaaccaattaacttccagacctgttctttcattttggatgtttagcagagttggttttgatttaacatattatctgtagttttgaaaattccacaaattctctgttactctggaatagggcgtttctcattgttggttcccgtgactggtggttttaaaacattcttcagttgcttagtcatctccaactcttcgcagttttaaatcatggatgaaagttgtttgactctcttcctgcttaagaggtagggtgtgtgcctcccctt

SEQ ID NO: 64283 - DNA, 1001 bp, Bovine  19866881148603
  misc_feature (1)..(1): n is a, c, g, or t
ntggagagcatttgagtgggttctagtaataaagatacttgtaacagtttcaagcacagaaacagagaggaaagattgatttgtccagggttgtatagcctggttgtacagaccgggtttaatatatgttctcttccttttcccaatgccctgaacgtgctcttgtcaaggagataggtgtatctcatcaaagcacattttgccatgtccaccgaaaggttgatgtgtttatgtaatggaatgctgtgaagtaattcaagtgaaatccatgtgtcttgagaaaaaagcaagttgccgaagggtatatgtaccatttattatatagaaaataaaacctttgaatactgctatatgttatacacagagaaaactgtagttcaagtgtaaaaaagaaaaaaagtttgataatgagaaacactgattttattacggtcttacttctgatgagggaggaagaaaacgtaacaggacttggaaattttgatttttcgccttaatatgtttacttcttaaaaaagaacaaaacgtaaagccagggagatgagaaaggtgaaaagagaacaagccacatgtggggagcacaggcaaataagttttttgttttagtatgtcctttgtgttttacctcttacaattcttgtgggtgacattgacaaaatcatagcatcatggtctttgggtatgaagtagttcttttctttagttccgcagatgttagccatgatggttgaccttgaagaggatgaggactgggcaaatgcggatgaactggaagatgatgactttgataggtaatcacataccccgaactctgtacggagcttccctggtgggacagagcgaggccagctggcggtgagagcttagggttacagggtctgtctctgccccacgtggtggtctacaaacctgaggttaagcttttaaatttgaaacgtgggacattttggctttctccattgtgtgttttcctatatcaaattttgtagatatttatttct

SEQ ID NO: 64284 - DNA, 784 bp, Bovine  19866881252624
  misc_feature (1)..(1): n is a, c, g, or t
naatgttgctttcctcctctcgaagcacaacaacttgatggggtgactgaccttgaatggtgatgcttggttctaaatttctctgtaaatgtcttccctgatttttcggtcgtaaaattgaggttttcttgtctttggcctcaaagaaatggaaagaaatggaatctggaagattaactgcacctagaacaaccaagatgacgctggtcagaccaaccattgctgaccaatctcaagatgaccgtcagggaggactgggctgtttctgcatgtaactccctctctgtctataaaatctcttgcccactgattgagaatcagcctttggacaggcgtctgtcctccccgccagaggccggcatccaaaagaaagcagagtttccattccaccaacctggaccctattgtcttttgagcggcaagcagctggatcccactttcagttgcatatccactgtgcaaatatcagaggccactgtgaccttgccaggctcagcccagacaccctgtctcatttttatttcacccccgagtcttacagactttcccagcatgggggtctgtcttcattagggaaggcccctcaagggaagaccagtcattctttacagagtggtcacactggctggcaccttcctgagacgaacgctgtgtgcaacctgctctgcttgggtgtgctcggcaaaacgtaaggaggagggatcgagcctctcccttgactatagataacaaatgaaaagagcttcagctgttggcaagctgagtgaagacaatcagagattat

SEQ ID NO: 64285 - DNA, 1298 bp, Bovine  19866881297373
  misc_feature (1)..(1): n is a, c, g, or t
ncttccctggtggctcagatggtaaagactcttcctgcaatctgggaggacctgggttcgatccctgggtcgggaaaacccttggaaaaggaaatggcaacccactccagtattcttgtctggagaatcccatggacagaggagcctggtgggctacagtccatgggatggcaaagagtcgggcacaactgagcaactaagactttatactgtaaagactttccatgtttggctgctatttcaagagttttctgtgatctaaacagtcctcattagatcggatcctccacaaagcactctgaggacaacatatcttgaaagaaatctacaaccttgggcaaagcagagcttcaaacaaggtccccccacaaaaaaaaaaaaaatgatcatgggtttaaccatggttgaatctcatctgatgggaatccagaaagtcctcagggagaaaaagaagctttagagataggcctaaaaggaggagaactatttcaacaggtggagatggggtgtgaatataaaatgttcatgtaagcttctcaaacagtcacacctttaaattttcccctgaaatgtgctgggcttaattaattcagtctaaacccctcatttgcctcttctctctctgcttaagatacagcgaaatgggaacaccgtgttcctgcttcctcccactggctcctggaagcagaatgctcggaaaggtactgagagggtgagtcgaagactctattcgtacctcgtggccctggctgtggcactgcagctcatcagactcagaaaaaagcgctccacaagtgtgatgtttttgcaccgaaaataggtttaagccaagttaagttttgcgacactgctcaggcaggacactcatatttagatgagtccaaaaggcatcatttatcaactgcagctcacggtgccttaaccacaggtctcagacagcagctgggctgaggcacatcttcctctgtattcagtttcccagcaaggtcagcacagggcctgacacagacaacagagcccgcactggagctgcccgggagacccgtccttccgccctgaccctggctcctttcatctggatgagccaggagaggcgaaacaatgccagtgttttctgtgtgctcattaattaactctgcaattaagacactgtcatcaacaatcgaacagatgccaagggcccttcttatttcctttgaaatcaagatagctttggaacgacatcttgtctagaacacaccaccaggtctacaaacacacgcactgcgcactctcctctaatgcaccataaggacacc

SEQ ID NO: 64286 - DNA, 2424 bp, Bovine  19866881360727
  misc_feature (1)..(1): n is a, c, g, or t
naagaagttcctgagaaggtaagtactgagtctgcagacactgaaaaactccaggaagaggggtggtgattgaaaagcctgtgtgatttcgtctcacaggtgattgcagcactgctgcagaccatggaagaccagggcaatcagcgtgtccaggcccacgctgccgccgctctcatcaacttcacagaggactgtcccaagtcactgcttattccatacttagacagcttggtgaagcatctgcattccatcatggtccttaaacttcaagaggtaagtttcactgtcttttaagctgtctgtttggctggtatagtggaaatcggagggaatggtgattctgaaagagacttctcaggaaacgttagcagtttctgccactttgattttaaaaaggtgaaagagaaggaagcaaaaagtgctgaccactctcttaaccagaatgacagacatagagaagacgtgaaaaaagaatatcctttttgtattattaaacatgttgaattcttaaaataaggcctggccatccaaatagaagatggtttatagtttacagcttaagtaagaggcaacctaaaaacaagtgaataataatcagtgcagcagcagaaaaagacaggatgcaggtaagacaggcaaaaacagaaacctggtttgttatcaagtagaatgaaatgaaatttctgctataaaataaaaaggacgcacaaaataaaagccttttaattcgaatattcagcaaacataaagttactgtcagattgctataaaaatttttctaaacactcagcgtctgtactttggctcatgatgaactggtaacagttggtaaaccgcacttcacctagccctggtctaaaggagagcagagaggaagacgggaaattacaaggtcccagaaggcagagaaggggtctgaagcagaggatgggcactcagtgaactacgatagcaagctaagagcatgatacaggaaggtgagtgtagtacgtgaagacagggaggtagtcgagttgagggcaggtcagttaggtcagttagttaaatcagaaatagatgggtcagataggacgttcgagtagatttggctgaaggatggctctatataacccagctccccgctggggacccgtgtgtgaggtgcagactgaaggaaggggctgctgagatgggataggggaagagggtcgtgtgtgtgagaagagctgtgcggaggcagggtagccaaggaagaaagactttcctgtgggatcacaggctggtcatgacgttaaccacagagcagatgcgagatgccaaaggaaggagtgagctcaccttgcagagcagtgtggggactcgaggtacaagtagaaagagctctgccgagagtggctgtggttgatgagggggtggagggtccggagcagttgccggctcaattatttctatgaacccacaaggaattacagaataacattgccaggtgctgacatggcctgaccgcaagtacccaggaagaattttcctcggcaggtcagagaacactggattgttggtgcagggggaaggctgatctcacctgttgcaccagggtggagaaagagggcacctctcaggggtgtcctcagtggtatttttctggggagaaatagaaaataaaggaatgggccataaagggaactttctccacgacctaatcggacagcacaagatataaaattaagtagtggaaataaatgaagaacaatgagtaaaattaagcttgctggatacaaaaatttaagggagttcacatttatgctcgagaattagccgtgactttgagataaagtggacacaagtgaggagcgctgtgctgacaggagagaacacctcacagatagttcagcgggggctcttcagtttgcgctgagacctagtctccactctggctgctgtagggtgggctcagcgtgcagtctcagtgcagccctcgggaactggccgggagtgcttgccccatcttctcctctgtggggctgatgttctgttgtcttccttccagttgatccagaaaggcaccaagttagttttggaacaagttgtgacgtctattgcatcagttgcagatactgcagaagaaaaatttgtcccctactatgacttattcatgccgtcactgaagcacattgtcgagaatgcagttcaaaaggaactcagacttctcagaggaaaaactattgagtgcatcagcctcattggtctggctgttgggaaggaaaaggtaagtgacttgtcaacaatgtgttgggtttgttgtgtgtcatctggctttgggggcatcgagggtaccagaggatttttttctttctgataagaggttttctaaagatttagttgttttccatcatcttattcttgaattactttaattttatatataaattatcagcttcatttttt

SEQ ID NO: 64287 - DNA, 1310 bp, Bovine  19866881376572
  misc_feature (1)..(1): n is a, c, g, or t
ncttccttccttcctttctttcattcctttcctgcaatgcctgctctatgactgaaaacaaaaaacacaaatggttaagacattatcatgtcctagaagttctcaaggtgggcatacagttataatccaaggcagaattggccatttgagcagtttgttaaagtaacaaagaaagacacgtcacttcaaatcgaccctatgccagggcctcttatttctaaaaactcctgactgctctttcactcatagaagataaaagtgggctaagaacatggcatttgataacttaggactgatacttggttcacggttttaggctgtaagttctgcctcttacagaaagtagacccactccatgggcttgagacgatggctgtggtttgcatttttgatcattaaaagcagaaaggaggggttactgagtgtcctgctgatgctctggcctaagagtgacagacactgaaacatccagcagagatggaaaccccgtgcgctacaggactggcctctcaagttctgatagttagtgaaaactcgggtcaaatctccttttcatttgcacagaacggagaacctcatttcaccttaactgagttatttgcttcattctcttagggtcttattaggctatgccctcaggccttatttttgagttgataaattggcaagtttggccctaaaatggattatgggccaggaaggtgggaaccggcttctggctcgttgtgcattttattttctattgataggcctgttatggcgcacaggctctcgggtttcctgagaaatggagccattttgtaaacaaaacgctgtcattttaagccattagaatgcattatatggggcataatggccaaaggagtgcgatggggagtcaatgagacacagactggtgaaatctccggctttctgactgccttgggacttgactgccataatgaactcagccttctcattaccctttgtgttaaaaaaaaaaaaaaaaacaaaagcatagatgtgctttccttcttcgagtcgaggtggatttagcagtactgactctagcttgctatttcagggactctagttgtttttggagtcacataattttctcttgggtttccctggtggaggagcggtaaagaatctgcctgccaagggaggagacctgggttcgctcctgggtctggaagatccctggaggaggaaatggcaacccactccagtattcctgcctgggaaatcccatggacataggaggctaccaggttacagtccacggcaaagagttggccatgactgagcacacacacgcacagaatctt

SEQ ID NO: 64288 - DNA, 668 bp, Bovine  19866881379357
  misc_feature (1)..(1): n is a, c, g, or t
nctaaatgtgttgtgtgtgatttaagagcttccttgtatttaaccaggctcttacttccaaatgtgaatgttaaagaaggaaaaaataactttatcatgctattggcataatattatactttttttggattgaattcatttttattctatgggaaaatatctgatgtataatgtatagaggaaagtaatacatcattgaaaacatgaatatgtgtactttaatggtgaacagtatattagaactttacatatcttatttcagctgaggctccatagtcaataggacactaatattaaaaggcacatgaattattctgtaaaagtatactctctgtatcatgacaaaagtaaataaaatcaacaaatctttattgaacattgacaatatgtttttttaaaaatgcaaggtgctgatttgggacagaatattggaaaacttcttcaagatgcttattagaagagatagatattttctagttaattataaatgaacacagaattaagtaatgattttaacaaaagtacaagcaaattgctacttaggagtttggcaaaaggaataattagtgctgacaaaggggactgatgcagtcccaaggaaacaatgcggtcccaaagggattgatgaaggattcgctgaaaggggagcattgaccttgattttgaga

SEQ ID NO: 64289 - DNA, 818 bp, Bovine  19866881665378
  misc_feature (1)..(1): n is a, c, g, or t
naccattggaggcgacaccagcctctcctgctcgaccatggagcctgcagggtgtgcggtgtgaacctccagggaagcagcagattgtccttcagagccaagcggcgattgtcagctgatatctctgagtcacctttgggtccagttactgcagtcttcaccatcgtcctcagtcccctccaggcacctgcaacttcaggcgtcgtggcccagttgatccacagggcgacctccttcgaaagctatgatggcattgtcacttgagttgacagaagcaactatggtcaacgttaaaagtaatcacgggacagaaaccggaagaattcctgtgaccgcttaaccattaaaatattttgtcttctttaaaaaaaatagatgagtcaaggagaaatattttcctaccagagtactgaatttcaggaactgagatagtgcttctaaccaatgtatcacatcaaggaagtaatagcagctgacctgccgacagcattccagggagagattctttgctcagctgacacacttctgtttttcaaagttgatgcttaattgtagatgttatcctaatttgtgacacagaactaactcacgcaccagtctctgatagagccagagtcagcacaggttgggtgaaaatacagcctgatgttagaatgtcatcacctgctttgcccagaaagtggagactctcacaagggtttgagtcaaattaaaaccccagacccacccctctgttcaccaagcagggatggtctttgttactttactgaacaagaaggaagcaactgtgatgggaaaagattgcctagccttactaa

SEQ ID NO: 64290 - DNA, 4984 bp, Bovine  19866880195804
  misc_feature (1)..(1): n is a, c, g, or t
nttgtctgaaaattgattttatttttatatgtcaactaaattagatgtcaactaaattaactggagcataaaatatgccagcaggatatatttacaaatacacacagcaaaatggtgtgcaagtaacaagaatccgatttaaagtcataagcacagaaagactccccgcgatgaggcccaagccgtccataatcctctctgtgttgcaggtcgtttgtgcacgacaagcctgttcacagtaacacatgtcatgagcaaggtggctggaagcgttttctttctcattatagttcacggctggggtgatttctttcttaaggttctcatctgcattggaaagcttgggttgcttaattcctcccaggtgagcagtgtgtcgccagacatcacattcacggaccctgatcccaaggttaaggttggctcaccacctccatggagagatgactcccacaccgaagtctgcagccctgatccctctttacagctagagcagtgtaccctgcagcctgctgagggccgtcctggatatcccaaaggtacctcaaacctatactatacatatatgtatatgtacatatatatgtatatgtatatatatatatacttatacagagacaactcatgacctcctctccagccttctcttttctgttattccagctcatccctcccatttatccaacaggtaaccctgatacctatttcctacttgccgctgatccaatcccctcaaagtcctggccattgtactttctaaatctccctggagcctgtctgcctttctccatctccatcactgccccactggtccaaaggaccaccatttccagcctggaccaattcaagatggtgtatcttcatttaccctcaccaaagctcttcactgaggatactgagaaatttcctaacaaggtcacgacgccctcccctggccagtgctcacctgcctccccgaccccatctctcatcttgagctcctggggcttctgtcccagaggcccaccaccgttctgggcctctctcgactgatacctttgcctggccttttccggctgcctggaattttcttctctccccttgttgccaagttaccttctcctgactttcccaactgggtcaatccatagttgcaaattcacgtttggggggaacatatttgaaagtaaactgtctttgctcacctctgtgttcccagcatgccacctgtacataaaaccatggaatgattcactcacctctgggccagaggagtgcccactctggcttccctccggcagggagacaggtccatctggagctccagggagcctgccctaatggtttaaagcctgctttagggcccacacaggctgcttcccagacctggctcccagaggacctgctgttttcacccctgtgcccaaggggtggccagagggcctctgtgcaagggtcagatgacagcatgttttaatagattccaaggggtggctgttccagaaaaaacatctacttctacttcattgactatgctaaagcctttgactatgtcaggatcacaacaaacggtggaaaattcttcaagagaagggaatatcagaccagcttacctgtctcctgagaaacctgtatgcaggttaagaagcaacagttagaaccagacatggaacaatggactggttcaaaattgggaaaggaatacatcaaagcctgtatattgtcgccatgtttatttaactttcatgcagagtacatcatgagaaatgtcgggctggatgaagcacaagctggaatcaagattgctgggagaaatatcaataacctcaggtatgcagatgacaccatccttatggcagaaagtaaagatcctcttgatgaagatgaaagaggagagtgaaaaggttggcttaaaattcaacattcaaaaaactaagaccatggtatccagtcccatcactttggggcaaacagatggggaaacgatggaaacagtgagagactattttcttggtctctaaaatcactgcaacctagatgtccatcagcagataaatggataagaaagctttggtacatatacacaatggagtattactcagccattaaaaaagaatacatttgaatcagttctaatgaggtgaatgaaactggagcctattatatagagtgaagtaagccagaaagagaaacaccaatacagtatgctgctgctgctaagtcacttactaacgcatatatacggaatttagaaagatggtaacgataaccctgtatgcgagacagcaaaagagacacagatgtatagaacagtcttttggactctgtgggagagggagagggtaggatgatttgggagaatggcattgaaacatgtataatatcatatatgaaacgaatctccagtccaggttcgatgcatgatacaggatgcttggggctggtgcactgggatgacccagagggatggtatggggagggaggttggagaggggttccaggatggggaacatgtgtatacccctggtggattcatgttgatgtatgacaaaaccaatacaatattgtaaagtaattagcctccaattaaaataaattagtttatattaaaaaaaaataaatttccagcctccagaactatgagaaaataaatatctgtggtttaggtctaaaaaaaaacaaacaaaaaacaaaacaaaaagattctgcaattactgaaatgttggttccaaacttcacagaaaaaggaaagagacagaagcacagaggtttgtactatttaatgataaagcaaactcactagacacctctgtagattcttcccctcagctcctttctgttgcttccagctggttctcagaataagctacgtgtacccagttaaatttccacttaaaagtaaggtaaagccactttcctgtttgcttttaagaactgaataagggagagagaatcagctgaggagacgatggtgcaccccaggcttggaaggagcctgagtcatccctacgcttgggcacagggtgctctgctggaatcctgtgcccctgcagactcctcctggctcaggagcaaggcagctccaagccagacccatcttttctgcatggaggcaaaagtgaaaacacccaggctaatgtagttatcagaccattcatcacatctgaaaaaggaaagaaagaatgtagcaaaattaaatattttccattttaaaagttttctccacttttaattataaaaataacatttgttataacaaatgttggaaatttccccaaagtacagtaaaaaaattaaaatttctataatctcaacttatgctagctcactgttaaaatactcccttccaggcttttacatatacattaaaaagatgggatgatattttaacctcatttcctcacttaatagaacatgaatatatgtccatataaatgttaatcattagatataaaacataattttgatggctgcatagtattccaccttgtaatgatatccttagttatttaacttatgtcttatttttgtacatgtgactcgttcccaattttttttattcttatgggctcctaactgatgaacagccttctagctacatatatgggcccattcaagagtatttcctctggtgtgggttaattggcatatgtagttatgagcccgcccaagattatttcttttggaagaagtggaattggggcttaactggtacatgtagttcaaatacttttgatattttgcctgggaagtatgcatcagtttatacccccactagcagcctcggttcaatatagtcgctcagtcatgtctgactctttgcaaccccatgaaccgcagcacgccaggcctccctgtccatcattaactcctggagaccacccaaacccatgtccattgtgtccgtgatgccatccaaccatctcatcctccatcgtctccttctcctcctgccctcaatctttcccagcatcagggtcttttcaaatgagtcagctctttgcatcaggtggccaaagtattggaatttcagcttcagcatcagtccatccaatgaacattcaggactgatctcctttaagatggactggttggatctccttgcagtccaagggactctcaagagtcttctccaacaccacagtttaaaagcatcaattcttcgatactcagctttcttcacagtccaactctcacatccatacatgaccactggaaaaaccatagccttgactagacggacctttgttggcaaagtaatgtctctgcttttgaatatgctatccaggttggtcataactttccttccaaggagtaagcgtcttttaatttcatggctgcaatcaccatctacaatgattttggatcccaaaaaaataaagtctgacactatttccactgtttccccatctatttcccatgaagtgatgggaccagataccatgatcttagtttttacatccccataacttattgattttataactggaattttgtacttttcaccaatttcacacacacacaccccgactaatcccccctcttttctagcaactgcttctccgaatatataagtctgggttttgtttagttttgcatgtttgtttctaaattccacatacagggtttctctggtggctcagtggtaaagaacccacctgccaatgcaggagacacaggtttgatctctgggttgggaagatcccctggagaaccccctccagtattcctgcctgggaaatcccatgaaaagaggacctggtgggctatagagtcagacactacttaatgactgagcacacacaaagaatataaacaaatataagctgtatctctggtctcaaaaggagtttaatatagttgttgagaacaggcctacatgtatagagtataccttcaaaaaaattgggacaatccaatatttgttgatccagatacagtataaatatcatatgtgtaacacagacaaataaatgtctgtgctaaaactgctaaaaatggacca

SEQ ID NO: 64291 - DNA, 1141 bp, Bovine  19866881021855
  misc_feature (1)..(1): n is a, c, g, or t
naagtgttgctgtgcaggttttctcgaactgtcttttctctgttttatagaagtatgaaatgataaagacagaagaaattcccaatttggaaaactctaatttttctactaaagtcataaaagacattgcacaaaatattttatcatttttaaaatctaattgtaccaaggaaggacatacctattggctatttaaaggtaagctaatgtttcagtgagtaatcattgatttgattggcaactgtaaaatgaggtttatttggttttttgttttgttttcttcccagcaagtggcagtgatatagtgaagctctacgatctcactactctttgtgaagaaactgaagacaaataccaaaatccattcacaatgccagtggctattcttttatataagtgagtgctttaagtagttaagatgaagaagtagccttatttaaaagttttaagtatatggcctccctatctatgccaaggttttaaataccttttagatgttcatagtttaaaaaatgtgtatgtatatacatctatatactgttgcaaaataaataggaaaagggaaaagagcaggggtgtaaaacgcaatgttttgttgtttcttatgcctttattctgctggaaggaaagaagagcatgcctagacttgagtctggagaaaatgatgaatgggcagtaaagttgatataaactccttttagggttgcttgcaacatgatgatgaagaagaatcaaaataagaaacactacgggacagttcgaaccctgcttctgaattgtgttaaattgctggacaaaagcagacatcctcaagtaagattaatatacgccctctaaaagaattttggcattctgatagagaatggttgcctagacattaacgccacctaatgcatagtctgtaactgcctgatctggtttgctaaccagtcaccacatgttgtgcctaatctgaactgagatgtgctttaaatggaaaacacacactgaattttgaagagtctgtgtgtgtgcacatgtgtacacgttacatattgaaatattttgtgtttattgaatcaaatatattaaaattgatttcgccagattttgttccataaatttagaactcacataattttaacaaagtagtgccattttt

SEQ ID NO: 64292 - DNA, 859 bp, Bovine  19866881022820
  misc_feature (1)..(1): n is a, c, g, or t
ntactgtggccatttcaactggtgcaggaaggagggaagtgaaaaaaaaaaaaaaaaaactagaaaaaggaaaggatgccaaaataagcaggtgaaagcaaactggaacacgattctaaaggaacataattctcgttacctgagacgtaagctgactgctggatatcggccgcctccaaagataggcatgttggagccaactaacatgtgtatgtcttcaaacgtccacaaaatattccgaacaaaatcatttttaagaccctttgatttgaaataaaatagaaagattatataataaacaggggatctgtaatctccccccatgagccacaaaaagactagaagaaggaaaagacaaagaaaagataaatgaagccacagtgcgagaagatcacagagatgcttaggaagagatttttaggatcaagtggatttttttttcccctataaattccaatttaagactagctcttagatgacgaagtagactggggatgtggtgtctcgacttggaccccacagagagcatacctgactgttctccccgtcattgaataaaggagtcaggttttgttctttaggcgctgaggccacatgccccactatgtatgagggttcaagaggctcacttccctgtgaaaagtgcaaggacaggagtgattctgctgtcataacttcttacagatggcctactgttaaagagtatcacccacacatcaaggcatacagctcaaacttggtcttgtaaattacagctgatatgaatcattacctctcctcacggggtgcatacttcagttcctaattgtcagtcactataataagctaaccattgagatcttacttaaatcaagactaa

SEQ ID NO: 64293 - DNA, 803 bp, Bovine  19866881376389
  misc_feature (1)..(1): n is a, c, g, or t
nccgccatgtcagcatgtggacatcagcagacccctcaaagcccccgacgccccttggccgagttccccgcagcgagggctcccacccctgcaccaggctcctcgtgtgccctgcgtccctgccagacccctgccggccaaccctgcactcaggcaggcccaggtacgcctgcagctcttaacctgatggaggtgcttggaatccggaccccgctacttgccagcatctgaacttggacaagttgcttaagttctcggtgcctatataaaacagttaattcagctcctgagatggggaaatgagaccatccacggaaagcgtttagtacagtgttgggtgcatagctgtggtgcagtatagtttagctattctgagggatattttttagtttatttttggttgtactaggtcttcgttgctacacgtgggctttctctatttgcagtgtgcgggcttctcgctgtgatggcttctcttatggcagagcatgggccccagggcatgggctcagtagttgtaaccacaggcttagttgctctaaggcatgcggaatcttctcggaccagggatcacacctttgtcccctgcgtcggcaggcggattcttaaccactggactgccagggacgacctcttaggaatatttttatctcttctattcagaatagtgagggtgcccattcagcttgtcatctataccaacagtctccaagctttttgacaccagggtctggtttcatggaagacagcttttccatggctgaggggtggggaggaggtttccaaatattcaagctcataca

SEQ ID NO: 64294 - DNA, 1201 bp, Bovine  19866881558176
  misc_feature (1)..(1): n is a, c, g, or t
naccatgaacgtgaaccattttacagagaatgcatgatagctcttaaagcttaaaccagtactttgtttaaaattgaaatatagttgatttgcagtgttatgttagtttctgctgtacagcaaagtgattcagttatgcaatatgtatgctttttttatataattttcgttatggtttatcacaagacattgactatcgttccctgtgctatacagtagagccttgttgtttatccggtctatttatcatgttttgcatgtgctaatcccaaactcccaatccgtcccgccccatccacactccgccttggcaaccacaagtctgttctgtagttaagccggtacacctaccctggaaaggaacaacagccaagatagggattgaacacatctgaagggggattcaaggtgatatttattgaggattccactgtaagaaaagcaaaaaaaaaaaaaaaggttttcttgaagattgtaaagaaaatatgatttattggagatatcccttgcttccatgctctaatatcaagcctccatatataatgcaagttttatactagcatagaaaagggaaaggagcagtcagatttactgttatgtatgagcatgaataatttttatttttattgctttcctacttcagatcaagttgaagtttttcccttttgaccacaggctcttgtttggtttgcagagagtatagcagaggtacatgaaatgtcatatatttattgtgtacgtttgtgatgggatgtaacataattgaagtagtaattcaaaagttatggttaggaattttaaataaatttaaagtcagagtttagtaattaacttctaagagttaagcagttgtgtgataatctgtgggtagactcatttagcgaccaagaagggactcactcaggccccttaagaaagtctctgacaaaccaaagggaagataattttagtaaacaattcagaaggagaaatgtgaactcattatgaacttgtaagggtgagtcctgggtagtgtagaacctgtcacgatctttctctaaatagtgccatacgattttacgttatgcataggaatcttagaagagtccatttctgtcctccacagcctttgtcttattctggtttgcttctgtatatcccattaacctcccaacgcatttctataatgtttactttaggaagatatgtattttagcttccc

SEQ ID NO: 64295 - DNA, 884 bp, Bovine  19866881615247
  misc_feature (1)..(1): n is a, c, g, or t
ntgttgctgtcatctgtgtgaattccgggtcagctttgattggtgtgtttttctctttattgtgggattctattttcctacctcgtggtttttattggatgccagacatagtccgtctcactgcgttgggatattggacatttcacattcatagaagtattctcaagcttgccctgggctgcaggatgatcctttcaggggttgatttcaggattatgtaggtggcactggaactgcgcttatggggtagggggtggtgggggagcgtagttattatttcctccccagagccccatgaaccgtgaggctttgcagcctggctggtgggaacgggcctgtggtagactgcatgggtgcaccaggcacggatcctgtccctcctggccgggagtggtttctcctatgggccctgctgactgagcgaggggccctcgtccatctgagtcctcctgcagagctctctcaggaagtctgaccttcgagctctggccacccgagtctccagggaccctcagcaccaactccatgatgcagggaacctggcagctcccccagttcccctcctaccatcacgcctggaaactgagggcagtaaagcttcctgcgtgatgacccctctcaggaatcactgtcattcactgcctggtggtctctgtctctcagactgttgtttcacatattttgcttatcatttggttgttgtgtgtgggagggaaaatccagtacctgttaccccatcttggtggtacgagactttctaattgttgattttgtcttccccagcaccagagagcctgatgcaggctttggaagacttagattacctggcagcactggacaatgatggaaacctatctgaattcggaatcatcatgtcagagttc

SEQ ID NO: 64296 - DNA, 1019 bp, Bovine  19866880394603
  misc_feature (1)..(1): n is a, c, g, or t
ngtattatctgcatatctgaggttattgatatttctctgggcaatcttgattccagcttgagcttcatccagcctgatcttttgcataatgtactctgcatatactagatactttgttttcctttaaaagtcatgtatttgtagagaaaaggcatgcacacactagaaacaaccaagaatgaagcattaatattaatccagtagtaatagcacaagggtaattagaaagacgagctcttaaatttaagaaagacaaatacttctggcaaactatagtaggttatttttgaagactaaaaaaatcttgataatttttgtctcacttttcatattcaacctcctatgaatgtacagaaaattctaaagcttgtcctaaaacatttagggtatctgaactcatcccaggcactaattattctgaattaaatatatcaacatttgtatatttggtatctgttattattacataaatatttagcacatctgcaaatatatcaacatatctatgttttgtatctgttattatcataaatatttaagaattaatatttaaccaataaatataaaagtaagttaataattactgttaatgatctattagaaacaaaacattctcgtgttaaagtgaaattttcattataaactgattgtatatgattattttggtgataaataagtttttgcaatttctagaagccaaggctctggattattcatgtggcattcttacttggaaatgcttcccacgtctgtggtaaaatctgatattatgaatggttcaattgatttctaagctcctagaaaacttttaaagggtaacatttaataacatataaaatttaatctcaccaaataaactggtattaagtataaaggaaaaatgtgtcaagttactcagcagtatataaggttacatgcttcagactacctgctttgtttattaaaacttccttgtcacatgcaatagctgtcaaaaatctcataacaggtatcagaacggctgtatttaaacaagacag

SEQ ID NO: 64297 - DNA, 2705 bp, Bovine  19866880485304
  misc_feature (1)..(1): n is a, c, g, or t
naattcctaatgccctctacttttacttcctctgactgactatcaggtatcagtcagatatcagttgagacaactgactatctgggaataaaaagtcaaagacgttatttatttctcttttgctaaaaaaaattgacatttcccattattctataaaagaagccttgtttatggtgcccatgctagagaacattgaaataaaatggtgagagaaacagagtatttagagaagagagtcaagaaagttcttttataattcatcaagatgaattctgaaagtttcttgcattttatttgtccttaactaaacttagcattaaatacaataactaaaacactattttattaagggtaattgattttggaataaagcaaatatgattttgaagctacctggtttccacaatatagacgtcagatgtccaaaagaaagtcaattttgcttctttgaaccttgttttctttatcaataatattggttaccagaggcgagagagaaaggggaaggggcaagatcaaggtagaggatgaagagatacaaactactatgtataaataaacaagctacaaggatatattgtacagcacaggaaataaagccaatattttataataacttaaatggagtataatctgaaaaattgttgaatcattcctcattatctgtgagggttttgctgctgttgttcagttgctcagttatgtctgaatctttgcaaccccatgaactgcagcatgccaggcttccctgtccttcactgtctcctggaatttgctcaaactcacatccattgagtcgatgatgctatccaatcatctcagcctctgttgccctcttctcctgccctcaatctttcccagcattagggtcttttccaatgaggtgactctttgcatcaggtggccaaagtattggagcttcagcttcaggatcagtccttgcaatcaatattcaggactgatttcctttaggatggactggttggatctccttgcagtccaagggactctcaagaatcttctccagcatgacaatttgaaagcatttattctttagcactcaggcttatttatggtccattttagacaagttatttaatcttatgtatcttaactttcatcatccataaatgggtctaatgttaggagttactttgtagagctatcatgcctgacacataacaaattctcagtaaactagtaactcattggcttgaattcaagctcgtcatcttccagatggggaagctgatccagaggatgaactgagttggcagagcaaggactgtgtgtgtgtgtgtgtgtgtgtgtatgttatttgctcagtcatgtccaactctttgtgaccccatagactgtagcctaccaggctcctctgtccatggaattatccaggcaagaatactggagtgaattgccgctcctttctccaggggatcttcccaacccaggaaatgcacctgggtctcctgcattgcagacagattctttactgtctgaactatcagggcatcttctactacagttctcatttcctgattctctggacccaagatggccaccaaagagtttcagggtgaacccttcccacagaggaaagggaattctgctgtaactacgagggaagaattatctgatctataaattaacatacatcacgtctgattttgaggcatctacaaatccagaataggcaaatctttgaaaaagacgttttgttttgttttgccttggcatctttcctgcttgataattaagaaaattgaagtgaaaattgaactatgttgatcataaaaattacatgtagcaacataaatttcaaaaagaagatactttttttttttttcaaaaagaagacatttatgcttcctgtaactactcaatatattctgctttttctgtcaatggagtatcaggttctagataaacaattccacggagatttgtaggggggaggacaatactacttaattttaatcttttccccaaaagcaatgcattataaaatatggtttagagtttaaactgatataaaccttgttaacagtcaggaggaaaaaaaaccccggtctatgtcagaccatatgttctgttgttttcttaatttggaaaatacagagagtgctagttcttcatgttcagcaagcatgtacagaccattctttctagctacaccatcattccttttaaaaaaacagaacatgctccatgaataggcctttccatagggcctcaattttatttttccagagtttggagaagcgttatccatcaagttccctccaccgttgagaataatgctgtttttgtcacacacggggtctattttgagctcaaatatgcacaccgactgtagactataggcatgcagaactgtcagcacaatgccccattacaagctgtccctatagcaagatgacttcatttttgcaggctgttctgcttactacattctccttggcttcacagttcaacgtagtcaaacaaggtgatggcatttttaaggctccagattttattggtcttcaaattaaggtaggtggccaggtgctattttagagcttcatcggggcaacctcatgataaatttgagtacatcgaaactataagggggcacttattttatactggaaacataaatactggtttatgaaaacggctgctgtaacaggaagtgacttcatatatcattacttgaaataaga

SEQ ID NO: 64298 - DNA, 2256 bp, Bovine  19866880533102
  misc_feature (1)..(1): n is a, c, g, or t
ntgattacttataagtcgacactttactagtgttttctcatatttggtaacttaaatccttagcaagagtgggaactgagtctttcagaaaacactcctacaagatttgtattgcttcagatgatactctttgtttgaacaatgcagactctgttccactttggaaagaaggcaaatttcgaaaacactgacgggaattctcttctgatgttctttcatatatgtcagtattcttgtccactgatcctaagtaataacttttaaatgagtaacaaccaaatcaacaagagaagttatttactattgtggtttattgcgagtcacaaactaccttttgtatctgtccctagtctcatgtcttcttccatcatccaagaaaccatggcaggctatcttgttagcttgcaaatagagtaaaaaaaaaaaaatcacaaattctacatctttatattgatatagatatatggtatcttatataaagcagaagatgtctaaatagataatcttcaatcttttcaatttctggaagggaaaactttctggaaatatttttttgtgtgtatgacgtggtttagacttatttggcagtgaaaaagaagaactgactttgtcttggatcctgggagaaaacacacgatctggtcatattgggttagcaatgaaaggagacacaagagtccagagaaccaaattcacacgagaaaacttgacttcctttgagtcaaactaacagtgaagcaaccacttcatgtatctattcaaaacttgaattattctctttaaatctgcttctaaaattctattctagtgaatatttttaaatactaaactgtaaaaactatccttttagctttgtattcagaatagattgatcttgagagggtcaggtcactcagtgaagaaggactaagcaaatgaaaatagatgcagagatgagggagcagaaatatttggggaaagttagtcaagctcagaaacagaccaaaggatctaaggagtatcttgaaatgctttagcaaggtctgcctgtatccagagctctgccaagacaattcttaagacccagggggaatccacccccatttagtctgagttttgggtactgtccttttagaaaccccatgaaagttccctgatgaacacataaatgtcttaattgtgaaatctcttcttatcaaaatttatccatctatttttctgctggctttgccttgtacttttacattttgttaatataccatttactgatttttggtctgaatttcgttaaaattcaattacttttgttctgttttattttttttcagtctctccataccccttccatgtttgtctataatatctgttcgttggcagtcatctaagattagacctgcattgaggtatttctggcaagcatttttcaaagacagctctacataaaaagcagtagacgagtaaaattattgttggctctttgcctgagaaaaatatacagagttgtccacaaataccaactcagatcttgtaatatttctgtcaaatgaggtgtgaagtagtcacagatatatatcaactaacagagagagactttgggtattttattttaccaaaaacattagaatacttatggtctgaatcgcgaaacactgaaatgtctgaatctatgtattaacgatgtccttttcacaaactgcaggagaagcttcaaggttaaaaatggatctgtgttaataatcaagtattaatgacatagtaacatttttacaattgaatatcatgtttataattttaagtgttttagaagatgggaacttaaaattatctcaacccaatcatcctattcaagaaaaataggctatttttgaatatatgtaccaaaacatcttctataaaatccacataaggcaacacttttctttttttcttttctccccagctttattgcaatatgatacacaacattatgacttgatgtatctgtgcatataccagggctttcctggtagctcagctgataaagaatccacctgcaatgcaggagaccctggttcgattcctgggttggggaagatcccctggagaagggataggctaccactgacatgaaacaacagactggttccaaattgggaaagcagtatgtcaagactgtatattgtgaccatgcttatttaacttatatgcagagtacatcatgcaaaatgccaggctggatgaagcacaagctgggaatcaagattgccaggagaaataccaataacctcagatatgcag

SEQ ID NO: 64299 - DNA, 1125 bp, Bovine  19866880668913
  misc_feature (1)..(1): n is a, c, g, or t
ntttctgtgaacttgttaatataaggtagtatattaaaatccccccaggaatcaattagttcatagaagtaagtattcctctttttaaagtgcagttatctcccaaagaattgtatttttattgtttagccagccatgtaaaatatttataaatatttttaatgctttatacaaaaaaaattaaatattttttctacccgattagtactcaaagtgctgcttggaccagcaacatcaaatatcttcaggaagcttattagaaatacagactcttaggttctgcacaaacctattgaacaaaatgtgcgtttcatcaaaacctcagctgattcagacacacatttgacaagttatatctactttctaaaaatgaatataagtactttaaaatgtgctgtcattatcataaggtgaagaaagaaaatatcatatagaatgtgttcatgtaaatatgtaacaaagtattacacttctctttgagtcagtaatataactctttaatatttttgattgatttatgctggaaattttctctttgaaatgatcagaatatatttaaaattataagttacaagtaagagattttaaattattttatgcattgttaaaagcaagatgaatgagagaaaaattgaagcaagtttgaagacacccgcactcctttgcacttaaaatttgttataccacaagagggtgctgatgcttttgatttgcaatttcaaaaattcacatgtacatgaaatgattttcataaagaaaagaatgaatatgtttcaatgtcattctcccaaatctctccaccctcaggtatacctgtggcggattcatttcgatatttggcaaaactaatacaatattgtaaagtttaaaaataaaataaaatttaaaaaaaaaatccaaaaaataaaaaaaaagaatgaatatatgtaatctataagtaaacctcacacaggatgaaagggtgtagagtattgttattattattattaaaatggaagcctgggttgtgaattacatgtgctatacaagattcttttatgtaaaataatttttaaaacttccttcatatttctacttttttgaattttccgcaaagtttaaagaaaactatttaacataaaatca

SEQ ID NO: 64300 - DNA, 3175 bp, Bovine  19866880736891
  misc_feature (1)..(1): n is a, c, g, or t
nactggatgaacaacctgctaggaggacttcctttgtagtccagtggcaaagaaattgccttccaatgtaggggacatgggttccattcctggtccaggaactaccgtcccatatgttttggggcaactgggcccacagagcacaacgagagatcctgaggctacaactagagagaactgtgtgccacagcgaagacctagtgtagcaaaaaaaattttttttatttttttaaaacttaaaaaactgctagcattagggcctataagcaattagtatgtgaatttaccacactctctctcaagggcgttattttgagttagcaaattatgtaattaatgcagggacaccttatcagaatgaattaatatttgtagtctagatcaagaataaaaatatcatctggtatggtatagcatgtaattattaggtttatggtcaaagttcattagcaagcaacaaatgatacagtgctcataggaacttctcaacatataggaccttatttatttaacataaggtcctttttatgttggaacataaaaattatattaaatagtgttcataattagtttagaaacaaaataataagtctaagcatgatgtatcacctgcagtggctgaaatcatgctactgtaacataatggtacctaatagggtaagtagtcattccgtaactaaactattttgatgagaaatgctttctcattattgagagggataaactgtatgaatgctttaggcagagacacaccccaggggaattaaaattaaatacacttttaaatggtggttaaaattatgagctctgcaagattttgtatgattttcatatttgaaaaaaaattacatattttacccatcatcctacaaaaattaataatttatctaatcccagccttttagattaaccagccttccttgctttgcccatgtctatactgttaacagtgtgcttgagttgcctcatttattttttagtcaatattgctgttattgtcatttttaatttccaggcctaatttttattttattaaaaatttatttttaattttttggctgcactgagcagcatgcgggatgttagttccccagggatataacccacaccccctgtagtggaaacagagtcctaaccactggaccaccagggaagtccctgactcatttctatttccagttctattcctgaacatctctagttagctctgccgatctgttaaaggcctcccccggcatgcgtgaatgtgtgtgtgctcagtcacgtctgactctttgcggcttcacggactataacctgctaggctcctctggcatgggattctcccggcaaaaatactggagtaggttgccatttcctcctccagaggatcttcccgacacagggattgaacctacttctcttgcatctcctgcattggcaggcagattctttaccactagcaccaccccctacccttcaaatctgattgttgatggtcctcctcagacactgtgtctatatttctgtgttgatcacaaggtgtccttacttctcttagagccgtgaccaagctttcaggcataccagaccagtccgcttatctaaccctgcctgacattagtccacatgcctggaatttcagtcatttttaaaataaagagacttgtttgcaacctctatctgccaaccctttgctgctgctcctgctgctgctgctaagtcgcttcagtcgtgtccaactctatgcaaccccatagacggcagcccaccaggctcctccgtccctgggattctccaggcaagaacactggagtgggttgccatttctttctccaatccatgaaagtgaaaagtgaaagtgaagttgctcagtcgtgtccaactcttagcgtccccatggactgcagcctaccaggctcctccatccatgggattttccaggcaagagtactggagtggggtgccattgccctttagagggtgacaaaaatttcaggaaaaagtcagggtttttttttgttgttttttttttgtgaatacaatataatatcttgaatttgtgacaggtgaaaaccgaggaaaatatagatgtactctgatgcacaaatcagactttgaatagcatttgggtttaaatctgttagaaacactagtattttcttccagactaaaaggagaaaaccactcccagatgtcttaatttttctgactaacagagaagctttcacaatttatgtaatgataggttcaattaacacaagtcttgtgattcatttgcaatctaagtgaacaagtttcagcccagaaatttttacaaatgtttgtggttattgtgtatttggctgttgatggtcaaagaaattaaacaggaactgatagttaacaaaaaatatctcaggaagtttcttgcacttttcagttaacaatagaagataaaaaagatatgtaattttgaatttacacaaacattttcactaacttaaccctggccaagtcactttgtttattgatctcatgtaatcaagtaaaataaacattctgtaacttactcttttattaaaatgggaaaattcattacaccttttaaattccatgacatttttttaatgagatactaacataattatttttaaagttgtgtgcattctcagtcgctcagttatgtccaactctttgcgatcccatggcatgtagcctgccaggctcctctgtccatggaatttcccaggcaagaatactggagtgggttgccatttcctcctccaggggaatcttccccacccagggatcctccccacccagggatcaaacccacatctcctacatttagcaggcaggttctttactactgagccacctgggaagcccccttttaaacttagattattctaataaaagttccagcatataatttcttatatctgccattttgttcttattaattatgaatttgggtaagctgtactgctccgatatcctgagaaagaatactgaactcatactggaacatgcatgtagaaacacagaaccaatagcagcatggcctcaacatccttcttccacttttcaaccagaatttgtcccagaaaagtgaattatgttttgctcttaattctttctttccttttaaggaaatagtgtagccatctatactataacaaaaaaagtattcgtaaatatttcattaaaacat

SEQ ID NO: 64301 - DNA, 1348 bp, Bovine  19866880754015
  misc_feature (1)..(1): n is a, c, g, or t
ntagtcataaattagttcatttttctcgatagtcaccctgtgattcaaaagatgcatggaaagttatgtgtgagtgctaagtctcttcagtcgtgtccgactcttttcaactctgtaaactgtggcgctccaggctcctctgtccatgagattctcaaagcaagaatacgggactgggttgccatgccctcttgcaggtaatcttcccgacctagggagctatcacttgggatcgaacctgcattggcaggcgggttctttaccactagcaccacctggctatctttaaaaacaaatgactgcttttgagctttctaacgtgaaaaacaataagtatggttgttgttctgccgctaagtcgtatcagactctgtgatcccatggactgcagcacgtcaggctcccctgtcctccactctctcccagaatttgctcaaattcatgtccattgagttggtgatgttatctaaccatctcatcctctgccaccgccttctccttttaccttcttttaaaatctaacgttgatatcatgcacacatttcacttgtaaggaaagttagacataagaagtatcactgcttgatttcaacttgctgtgttgataattctatcaagtttctcagccatatggtctgtagcttctttccacactccatagctccagacttgcccttctaactgcctaccaaacatccatacagatgtcttgacgataactccatctcagcaagtgtgaaaccaaagatacgatctcttcctatattccctaaaagtggtaatatggagaaacctgcaaggatgtgtaatcattcactacaatctctcaaatctttctctgaaattaccttgtgatacatttctctctcttgctacttctttgccccgggccctcagcagctaatacacacaccatgaaggatgtaggcttcttcctgcctcgtctccttatttccagttttcactttgccacatggctgtgggcaagtgcaacagatgtattccttcaaaatccaattttccaaaagccaattccacataaggatcaatttgtcaaatagtcaattaaccaagtttgtcgaattatacaaaaatcttctcttgagactggtgctttgagtgatgtctcaggggtgctcaggactgtcatttgcagaaaaaagaaaaaaagtctagtagtcagtaaatatcagtgaatgctcaccctgtactagacacacttttaagaaagtgagcttatagtaaagaagaaagacttaattcctatcttgagttatcaggaaagcaattttataaatttaggaaattgtttgtttcaggaaatacagccacaattatctctataaaa

SEQ ID NO: 64302 - DNA, 1887 bp, Bovine  19866880851778
  misc_feature (1)..(1): n is a, c, g, or t
ntgccctaatggtgtaatgggctctaatgtacccttatctttacaaaatcctttctttgtaaaaaaagaaaatagtagaaccattaagaaaattaaacgtgagaaatgagggggagctgatacaaaggatctgacagctttgaatgtctatcgctttgcatcaccctatatggttttcctaagtattgtgttcaaaaaataactcttaatacaagtttcaaaatctactttagatagaacaaatacttgatcttcaatttctcatatgagaattggttggtacatgttttattatgctttcttacattctattcctatttaacacatccttatatataaaattaattacatagtacttaattaataatatattatatattggggctttccaggtgactcagtgataaaagcatctctctgccaatgttggagttgcaggagacatgagttcaatccctaggtcagcaagatccattagagcgggaaatggcaaccccctactatagtcttgcctgggaaatcccatggacagaggagcctggtgggctacagttcatggggttgcaaagagtcggacacaactgagtgactaagcacgtatgcatattatatattaatattatcagtatattaattaatggcatatagtttcatatatggagaaggcaatggcaccccactccagtactcttgcctggaaaatcccatgggcggaggagcctggtgggctgcagtccatggggtcgctaaaagtcggccacgactgagcgacttcactttcactttcatgagcattggagaaggaaatgggcaacccactccagtgttcttgcctggagaatcccagggacagaggagcctgatgggctgccgtctatggggttgcacagagttggacacgactgaagtgacttagcagcagtagcagcagtttcatatataaatatatatttgtctcctattttctgtagtttgcattatgtatttgcacttttttatgctagatattgcatatctactctatttataaaatacatatatatgtatttgtgtttgcatgtgtgtatgtcgtaaagagttcgaagtgactctgaagtgacttagcacccacacacatgtatacattctccccacccctattttctgtagcatgtgttcttataagccaccatgcataatctgggggtagaggtagttatgagttagttaattaagtaaaccaaaatctacattaaatcacagcccaagtatgtaacacctttctcttcagtagatccgttaagctttgggagggaaagcaagggaagagaaagaccatgtgcattcaaaccagagcacaactgatgaaagggtaaagggcaaataaattttgattttaatgttacttaaccctttcagtgcccccagagaaggtagacagagttgaacaaaaggatactgctggaaaccctgcagagctgaccacacaatagctctgagggtagcagaatgaatgacttgcaaagagatcacaggctactaaggccattggcccaggaggggttaaacaactttatctgatcttcaactcttactgaacaattaacgacctacagtctggagaagttaaaagctagaagtgaagccagggctcctcaagactccagctggcattaaatgacaaggaagaattcaggggccagacaaagccgttattatgagccaccaccaagaaagaaaataaaattttttaaaaggggggtgtgtgtgtgtgggaggggtgggggagaatggaaaacagaacttaggagcaactttatgcttggtttttaagtaaattaaacctgaattgttaatcttcttgcctttgttgttaaacttgtttgataaaatttcaattccagaata

SEQ ID NO: 64303 - DNA, 1714 bp, Bovine  19866881010603
  misc_feature (1)..(1): n is a, c, g, or t
ntgtttatattctgtgataagtcaccaaacgtatttcttcttttagactgttaagccaaaagatgaatcatcctaaaatctttatgccttattgccttttctactggtgcagacatttgtatttggtgttgtctttcttaagaattttaagagcattgttataagaatgaaagaaggtctttatcttgtctattaaaatctcttcaagggctccatatacttgacattttctcagccaatcttgttttccagggcatgaaattacttatcagcaaatttccgtgtaggctctccaaatcctaataaacaaagccctttaacattgactcatttgaaaaccgtttattacacaagttgtatttattacagaaggttatgagaaaaacaaacttaaattacgcttcctgcctcagaacgaacttaaaacctagaagtatatcaagcttatgcatagtgctaacagaaactttattcaattagtaactgtcacctgttagttaaaggtaaaggtgtgtgttcagtcgtgtctgactctttgtgactctgtggactgtacccccctggactcctctgtccgtgaaattttccaggcaagaacactggaatgggttgccatttcctactccaggggatcttcctgacccagggatcgaacccacgtctcttgagtctcctgtattggcaggcaatttccttactgctgagccaccagagaagccctattatgggtacataaataaagcatggcatagaggagaccaaattttgttgctgtactcacacatcttatattcttctgtgttctattgaaatatggagaatgttactctcatggagaagaagtagggtcataaaatacccactttgggagcctttctgtttgatataaatcaagctggctcacctggctgagacttcaacctccagacacagtggtttcagatttctaagggatcttctcagggatcccttctaagggatcatttcctaaactttacccccttgctctacctctgatctctcctaagtagatggaacttgctgggttttgctggaacttcatttcctccttagaaaaatgtacaactttctcaagaagaattgcttggaggctgcccatggttccttccctcatgctaattccacatccagtaacaatgtctcagatattgtgatgtgcgcatcactggtaatattccctcagttgccatctgtgggtgtatagaaccctgctaaactcttagtgctctttggtacaatgtaatattactggtaatttgggaatttcagtctgcctcataattctgctgctcatcacaaattactttcaattacttccaatcttatggaatggaaatcacaaagaaaggcacttgaaccatctgactaaggcaggacaacatactgtcacttccagggctgtggcatggaaaaatctgatcatgtcagagagggagagggatcgactatatacagaactcagccatctaacagatgttccagggccacatacaaaagagggggtggtctcccatcagataggcatgtgaggcagctttccatttcaggaccatgagggagcggtctctgattaaaggaaggaatggctgaggagggaacaaaagctttggcagtttttcaaaagggtggtttggctccccacacaatcccatttttcaacctgttagaaatcagcactttaaggagacttccc

SEQ ID NO: 64304 - DNA, 1964 bp, Bovine  19866881108065
  misc_feature (1)..(1): n is a, c, g, or t
ntatatagaccaatgacccaaagctctcagaatgacctgatgacctcaggatcatggacagcttctgcacaagatattgcatcaaaacctttgtttaattactattttgttttccatctgcttacctaaaatcaatcttcttgtaatttctataaattcctggtcatcactcaccccttaatggcccttcttcttttattcccttcatactaaaattgttagagcataattcttataccaatctcagatttcctgaacagcagccttcaaacttactgattgctggatatgctattcctcaccagatgcctgtgatacaaaccagggataattccagtctcaacaaatgagataaaagagaattacagtcaatggcatttcacttgaacctatgtggacaaatggcccaaaacaaatcagctcatgactgtttatgttgctctcttatagaaagagaacaaattatcacagtctagtgggtagagctcaggtaatcctaaatttgaatttagaatttcctaaaagcacaagccttggaagaaaagttacgaccaacctagacagcatattaaaaagcagagacattactttgccaacaaaggtccatctagtcaaggctatagtttttccagcagtcatgtatggatgtgagagtcagactataaagaaagctgagcaccgaagaattaatgcttttgaactgtggtgttggagaagactcttgagagtctcttggactgcaaggagatccaactagtccatcctaaagatcagtcctgaatattcattggaaggactgatgctgaagctgaaactgcaaatactttggccacctgatacaaagaactgactcattagaaaagaccctgatgctgggaaagattgaaggcgggaggagaagaggacgacagaggatgagatggttggatggcatcaccgactcaatggacacgagtttgagtaaactccaggagttggtgatggacagagaggcctggcgtgctgcagtttatggggttgcaaagagtcggacacaactgagcgactgaactgaactgaaaaggccgaggcaattacttactgtgtggaatagactaatggagatacaaatgtgtaaaggagctaatgcaaggtcttggtttcaattttatgccaggaataacttcttttttcctggatagccatgttttcctatcagatactgcttcctctgtaaccaggaaggctagttttacttgtctcaaaccagtagatcgtgcactttagcaacagtattccaaaacttttctgtgcacagatatttaattctataaatcatctaaccaggaaattataattcagatgggagctccaaaacaaagttccccttgattattcaggcactttacctgggggaattactgattcattgtttacacaaacaatcaaagcagtgcttccaaaaacagggatcacataaacaaaaggttatacgacacagatcattttaattccggcggacgttataaatagctcagtcagtaaagaatatgcctgcaatttgggagacccaggtttgcttcctgggtcaggaagattctctggagaagagaatggcaatccactccactattcttgcctggagaatcccatggacagagaagcctggtgggctacagaccatggaattgcaaagagtcagactcaactgagcagttaatacacacacacacacactctacacggattatagatcagtctcaattccttggcaagaggcaagaatagagacggacaatctctgtcactgaattctatccagagtccgagatgcttttatgcagccactctctcatgagatgctcaccgtgataatacaatattgaaaagattgactatggaaacaagggaacatcatggaagcagtaaagaccctggatcttgagtcttggcttttggccaacttcttgcaagggagagaatga

SEQ ID NO: 64305 - DNA, 2011 bp, Bovine  19866881164570
  misc_feature (1)..(1): n is a, c, g, or t
naatactattcaatcagtatgtagagacagcaatgattttttttccctagttctattagtgtactgaaattcaataaaacacatattttgtctttgtctatatgaataacaggttgtatgtatggtagaaaggatctataagatggatcaaaaacaagttaagaaaacttgggttttaatctcttacgaaaatttattataagcattcttatttcttataatgaatcaaatgtggcttgtggaagactgaagaagaatgaaaaatgttgaaaggtggtatatgaagaattgaagtcagcgggagctatgacagggaaattcaattgacctttaaatgccatttgtggatagtatctatcatgcctacaacctacattactataactgctttaaaatccacaagaactttgtgaccttctataacaaactcaaaatgccacaaggctgacacaacaggaaggacacaggctctgatgactgacgtctcctgtgcatggtgcggtcgtggtctgattcgcacggtcctccacttcaggaggtgtccaagactggatccgctcttgctctcttggtcatttcccaccacctgcaccagtacacagatcctggggtctgctgtgctacttcagacttacccattacacctcagtctgtgaaacaagttcccattctgccttttaggcgtatagggtttccactgttagtaactatccaaatactaattggggaaattacagaacacttcactttaaaataattagtggttttagcatctatttttttgtttctttaaaatgcctttgtacaaaatcaaacaataaggaaatatataaagaaaaaaatgaaagattcctcccaccttaattctgctcccctaagctaatcatggacagtagtttggtttgacacatagagataaaaatagatatgtaaatatttacagttcataaaattcatagttttgaccacatttttttcaataactagaagacatacataatatatgttacttgtttttaaaagctaatattttaatatatttccctatatatttctgctgaaccaccaatatgaccaactgaatgtcacaaaaggctctctgccatttcaaatacagaaatactagataaagtatgacaaaataagataaagactcaggtatggctagaatgttagaactatcacactagaaaattaacacaaccacaattaatgtgctaagggctctaatggattaaaaaaaaagcaagcaagaatagaggggcaatttaggaagagatgaaattctaagaaagaatcaaaaagaaatgctagagatcaaaaccttaacaaaacaaagagctgatgggctcattagtagattagacatggctgaggaaacatctctgagcttgagaatgctgccgctgctgctgctgctgctgctgctaagtcgcttcagtcgtgtctgactctgtgcgaccccatagacagcagcccaccaggctcctccgtccctgggattctccaggcaagaacactggagtgggttgccatttcctttccaatgcatgaaagggaaaagggaaagagaagtcactcagtcatgtccgactcttagcgaccccatggactgcagcccaccaggctcctccgaccatgggattttccaggcaagagtactggagtgggctgccagtaccttctctggagcttgagaatatgtcagtagaaacttccaaaacagagaagcaaagagaaaaaaaaatctagaacagaatatccaataactgtgaaacaaccacgaaagcataacatatacatactggaaagagaaaaaagaaagaaacaaaagaaacatttgaagaaatagtaacagagaatttctcccaaatgaatgtcagccaccaaaccacagacacagaaagctcagagaacaacaagtaggataaatgacaaagaaaacctacacttaagcacattatatggaaactacacaaaatcaaaacattttttaaagtcttgaatgaag

SEQ ID NO: 64306 - DNA, 1365 bp, Bovine  19866881231609
  misc_feature (1)..(1): n is a, c, g, or t
nctctaaaggagagagtgagataaaggagttggcaagattagttggcataagtggaatattctagataaaggagaagtatgcacacaaataacccaactccttcttccttacctctcttcctcccttcctcctttctcttctgtcaaacaactacttactaatcaaacaccacacacaaaggattctttcaagtcctgggagtcattcagagattaatattcttctttcaatgtgtttatgatctagtcaatgaatagtaaatataactcgggtaaaaagcattaaaaaacatataaaatattcttgaagcatggacatattcccttgacattctagttatatttttctggggaaaaaagcagttctttcaatcaagaagtgtggacggataatttcagtgccaaagtggatcaggctgactcactttatgctgctctagttttctaacttcagtctcagaattccttcacggagagtaattgtgtacacaccttgcaggtatttctcattggcgctattaggagggaagtccatctgttttaccagtccaagttatttttgcatactttatatgcaaagatgttatacagaggtaccagaaatggacataatgacagttaaatatggttactagaggtagtcctctaaggtcagtgccacactgtaaaagttcagatggagtagaggaaagcatgaaaatcccagtctttctttttcacatgttgtgctgtagacatatcattaagtgcatcttcttttgttttctttatctcttacaggtctgtgaagcaggcagaagaagttacaagtggtccttaaagaaatggcaattaatcaaatccttatgtatagttctaattttatttactacgtgtaatcatttaaagaatggttatttttataatatcaataataaacaagtactcttgtaaccagggggtgcctaagtgtgtaatcaacaaaacactaaccctggcaaaggattctggggtggtcaggctgcctgctgccttttgacatggttagtgtcctgggtttagattactttatacctagttattaagattactatttgatacattaaatattgcctgattcaaataactttgcttaaaatttttctgtattttaacttgtctagggttttctacttcttatatttttataatattttctcattttttagattaataaacatacttatccgcacgtgccaagataagccatttaggtctctataggagttagctatcatgtcatcaactgccatatatattttttgtgcagcagcaagaggcatgttctccaccactgccccttcctctgattatcctccctagtcctaccaaaacaaataattgata

SEQ ID NO: 64307 - DNA, 808 bp, Bovine  19866881314251
  misc_feature (1)..(1): n is a, c, g, or t
nggaaggagagctcaaggaaagccgctaggagattttggagggctagtgtttggtataatcaggttattatcaggtattattcaggtttggtattatctgcttgtgagagctaaattttttttagaaagtagggtaggtattttgactcccttcaatactcactgtgtgtgtcatgttatattgcattgatacttaaataaatgaagtttctatccttaaaactttttcagacgagtgaggaaatggacatgtaattgaatactttacattgcctggtgagtgatgtaacagaagcatgtgcaaatttctaggggaaattacaaattacattgtctaaaaaaaaaatctaacaggtatatagaggaaaacaaattactgaaagtgatttatcttcagaaaactgctaggagctatcatataatacttagtgaagactagataaaaggatatctgaaaaataaatgcctgtactttatttaaatttcaaaataaaaattgctatgatatgtaacttcagagtctgcattatccttaattagataagtttgctgtttacttcttaataggaaaaacctttatgccctacattttgttcagatcagatcaggcgctcagtcgtgtccgactctttgcgaccccatgaatcacagcacgccaggcctccctgtccatcaccaactcctggagttcactcagactcacgtccatcgagtcagtgatgccatccagccatctcatcctttgtcgtccccttctcctcctgccctcaatccctcccagtgtcagagtcttttccaagagtcaact

SEQ ID NO: 64308 - DNA, 3078 bp, Bovine  19866881429208
  misc_feature (1)..(1): n is a, c, g, or t
nttttagatcttcctatgggtgggtttttcttgtctttggttctcagtttgaatatgatctcagtcaagtcaaagtatccacacaattactttctatctcatcactagatttggattatctgcttagcactttttaaatacctggtaacttcttgcttattaacttagtggtgtgttgcttctttcttccttatgcccccagaacagaatcctgtctgacttcttactatagtaagaattcttcaatgtgtctaccctgtcctaggcactctattgagaactaggattcagtggtcaacaagatccagttcctgccttctcaaagggctagaacttagtgagagagacaaatgaacatgtaattaggacacagtgtgaatgctatggtagcacaaccatagggtgcagatgtccttttcataagtcaaaattgatagtctagagtctgtcgtcttgtcaacgcgattgggaacatacttccctaagcgcattgctatgcttagttgctcatttgggtctgactctttgcaaatctatagactgtagcccaccaggctcatctgtacatgggaattttcaggcaagaatattggagtgggttgccatgtctacctctaagagatcttctgacccagggatcgaacccatgtctctggcactgtaagtggattctttatcactaagccacctgggaagcctctcttcattgtagagtctggggataatcagtttctgcatcaattggttagaaatgtacaatctgagactccaccccacacccaccacacccagcctgcaggttaacaaggtaactttctttggtctagaagacctcagtcttctaaacttgtagatctcactatacactcatttataaacatgataactgagaagtctccgaatctgtttttagatctggttgttaacactttcacccagagaactgctctttttctaccatctatcatttattgtctttaaaccagattgctgtacgtggccaatattttttttcacagtttcaaagagtatttattttaaaacaagctttcctgtggaaacatgtaggtagctttatgaaattttaaataaaatattcccagcatcttcttttcatgtgtaaacatcctcacatttatatacataccattgaatatgcagagaaataattaaatccataaattaggaaatagtgaataaggtaaaggaatattatacccacgttacgatataaagttttaggtttaaaacacactttatgctcagacagtaaagaatcttcctgcaatgcaagaggttcaatccctgggtcaagaagatcccctggagaggggagtgactaccaactcctgcattcttgcctggagactcccatggacagaggagcctggtggactacaaaccatggggtcacaaagagtcagacaagactgagtgactcacacttccactttttcacaaaggaataaggtaaaggaatattatacacattctaagatataaagttttaagtttaaaatacgctttaagaaaattccagagagctctttggtaatgtgaagcaaactataatgttacaagtttttgtcttacattttctatttctcataaagttgtataacacattttatttctataggtctaaattaaaaaaaaattcactttgtgttttaatttgagcagctactctgtctctgttgctactactgcatgttgaaagcatcaatgaattctcaattctgaaatccccagaaacattatcctatccttcttgtttatttagctaattttattacaaaaatgttgcatagtttatgcacatatgcattggaaatgatttctataatcaagctcattaacatagcttcttacacagttgtcatttttttgtgtgagtgattagagcacatgaaacctacttttggcaaatttccagtattaagcacaatttctgtcctttatggtccagaagggagatttaaaaaatggttggctcaaaagagattaaggtgttcattaatatttcatcctcaataagagtcatgattcaaacaaaacctcttttctttttttcaagtcacaccccatgtggaaggtctatatacttatatacaccaattataaaaaaaatttaaccactgaggtgcaataaaaagacatgtcctgttttatccaaatctccttagattggcttctccaattacagatgagagtcaggaaggagcatctgggagtagatggctgtcatttctgagacatgcagagtgttagactctataaattttaattctgtgtctgaaggcaaaggaatatttatatttaaaaaagaaaacacctgaacaaatggttcaagcccattgacattaaaaaaaggatgttaaatattccagggaaaatgatcaataatgaggtagttgagtatactgaaagaaactgtgtctctgaagccttagggaagaaattgaaaccacatctaaaacccacagcaaaaaaaaaaaaaaaagttagctgggaaaagcacctggccccaacaatgctatgactgagctcataaaagcagagggcaattatgtagctagtaccctgtaaaatgtgtcagagcacatggaaaaacagagggatagccagcagcctggtacaaatcaaatggtaaagactgctaaaataagggagaactgagagcaagaaaggtgcacagatcaggccggggaaagttccctgatttcccatcaatccagccacatgcctcaaatgcttcagtaaactattttaagcacaagatgtacaagatactcccaggaggagagaggagaagtagggaactttcagaaagaaagccttaactaaccacagcgatggaagtggagtcatcgtaacatcttgattatctttatatgattgagtttcaaggtctccatcaagaggacagttttataatgaagaaatagttctgaaactacaccgtttatttagcccgctccttccctcatagtggagtcagcatagaagccgtgggtcataagctgtactttgggaattgaaatgacttcaggcagattataccaatcatcattatcg

SEQ ID NO: 64309 - DNA, 830 bp, Bovine  19866881501903
  misc_feature (1)..(1): n is a, c, g, or t
ntgtgtcctgttgagcgttactttgaaagtagtctctgttctcctgatcctttttgtttttctctatttcagtgtaatcaatacgctcaatataaacagctaaatcttcaaacagatttgtgtgccttttgagagctacatttccaattacacactaaattaagcacatgattgaacacaaacactaacattttccaacaggtggtgaataagcgctttccattcatcagctcagcaacagcactctggccaaatcgtcactctgcttgagagtcctcctaacataccaacagtttataaccaatctaaaaacttacttctttaatggaaaaatttaggagaacgaagtgtctaattctaatccaagattacagagcagagcagaagttaatatttccatatgtgaagctaggaagtaataaagttgtatgtgttgcaaaatatatcaaagtctatctaaataaatttagtattgggattttggatgtttggaattaataattaatgcttgctctgccataagaaaactgtgtgtgaccctatggactatagcctgccaggctcctctgtccatgggattctcccggtaagtattctggagtgggttgccacaccctcctccagggcatcttcctgacccagggatcaaaccctcgtctctgaagtctcctgcattggcatgtggatcctttaccactagcaccacctgggaagcccaataaatacttcacagattggagaaagtactacgaagctttttttttctctatctatggaacatcagattcttgaggatcactttgcaggataaagaaatgcaagcattattc

SEQ ID NO: 64310 - DNA, 622 bp, Bovine  19866881718723
  misc_feature (1)..(1): n is a, c, g, or t
natgacaatagtgactgctctgccagtcttactaagaatagtcacaggaaaagtaagtagaggttctataggatctactgagtttagaaccactttccacatttgagcaaagtcatggccatttgttaatgaagcctacctaccaaatataatctagtacttaaatagatgagactataagaacagtacaataaaatagcctaagcacaatttgcatcaccgattcaatggacatgaacttgggcaaatgccgggagacggtgagggacagggaggcctgccatgctgcactccatggggtcacagagtcggacatgacttagtgactgaacaacagtttgcatgttctgcatgatctctgtttagagtaaaaagaagcgcagttctgaaaggcctccaggttcccacacagacagcaagccgccacaatcccttatcacactccctgcctgaatttggcataaagttagcagacttgaaaagctcaattaaagataaatagttcttaacaatgctgctacactccctgaattcacagaactaacgtaaatacgttcatatattacttgtttcaggagaggatattccgacatgacagccccggaacatcaactgctgacta

SEQ ID NO: 64311 - DNA, 850 bp, Bovine  19866880361146
  misc_feature (1)..(1): n is a, c, g, or t
nactgtggtcctgtctccaagacctcagagaatgtagatctgggtcttctgctggtagcagtgggcaccactgtgggggagttgtttgctcactctattatccttctgcctctgcagatattgctgtggaactcctccagaaggcagcccccagtcctattcgccggctccagaagaaatatgtagcccacgtgtcccggtgagtccacaattgagagatacagagtgagagtgtttgggttctagagagaggggaacagttacctctaaagagaacttgtaaagaaacagggatgagcatcataagttacaagaaccaaaagatccttgcgtttaattcctaatgctttctgatacccagagaggcttgcatctctccgtgtgctatgatgctggctctggtatacattgagcggctccggcatagaaacccagactacctacagcatgtgtcatcctctgacttgttcctgatctccatggtaagatgcccccttccctttatctccctggtaagcctggagccaggtgtgagctctactgataccacctctggttcctctgcagatggtggccagtaagtacctctatgatgaaggggaggaagaagaggtcttcaatgatgaatggggagctgctgggggtgtggccgtgcccactctcaatgccctggagaggggcttcctgagtgccatggtgaatagctcttctctctcttgctctgttttcctgacctgcttttatgttcttttcatcctttgttttttatctcccagcttcttgtggtctcttcatttatctttctgtttgtcttctttatgtcttcccttattagcatcttcccctctag

SEQ ID NO: 64312 - DNA, 1099 bp, Bovine  19866880550496
  misc_feature (1)..(1): n is a, c, g, or t
ncagccagagccttgggtgtcagcaagggccagtcccactcagctggggagggagaaggagccactttggggccagactcaagtctgaagcatccccctgcctgcaaaagcctgtgacacaagaagcctaaaggcctcattgtctttgaagataatgtcttgggacaaaacccatcaaactcagagtaaaaacccatccctttactgcgatctacaaagtccctttggtctgacccttacctctttctctagcctcatctacaaccacactcttcatcattcctttcactccagatacactggccttgtttcaggcctttgtacttgctgtgctgctggccaccacagggtctttgcatatgctgttctctccacctagaatgctcttgtctcttgcctttccctaataagctcctacttgtctctcacatctcagctcagcgatcacttcctcaagaatgcctttcttgggaaatctctggtagtccagtggttagggctccatctctcactgctgagggcccaggttcaatccctggacggggaactaagatcccacaagctgtgtggcatggtcaaaaagtaatataaataaataaaaataaataaaaaccattaaaaaaagaatgcctttcctaacctctccaataaagtcagattttttcccattgtaaaccttcatcatacaaggtacatgtcctttgctgtatttactacgtgcaattctacattcacttaggtaactattgaattagtatctgtattccctgacatattataagcttcctgaatgcaggctctgcattctaggagaaagcctacctggatgaggcagccaaaaccatggtgccttggtgggggcagacaactccccggggatgatgctgagacccagaagggcagagacaatccacacacaggccactgggatcagcacctgagggacaagactcagaaaagaacccctcccccagaaccttccaaccttcttaaaggggtaagcaacaaccaagtaggggccaagtgagcaatccatgccagccctcctaactccaactgcctctcgcccaaactcccacataccgagaggagcctgaag

SEQ ID NO: 64313 - DNA, 1561 bp, Bovine  19866880825744
  misc_feature (1)..(1): n is a, c, g, or t
ncttttggaacatcgggtcacgaatggcagcgctgccgggggtacacctgtcatcagggaagcaccagtatcagctgggattgtagctgtcacatctgtggcaattccacttgaggggtgggcactgggctgcttcactgtcttctagtttagttggacccaagctttcccacggtgaaataagtcattataaattactttgaggacttccctgctggtcccggggctaggactccgtcctcctgatgcggggggcccaggtttcatccctggtcaggggaactggatcccacatgccacaacttaagagtttgcacgccacaactaaagatctcacatgctgcagcaaggattgaggattctgcttcccccagttaggattggagcagccaaataaatatttaaaaaataaatcactttgatttcttctttatattacaatgaggacattatatacagagttgtgatcacagttgtcatacatgacgaaggatgtacaaggcttgagaactactgtaattgcgatggttccaaatggcagtggtgaggaggcagtacagtctatcaaacttgccctggctatgctgggggggtttcctccccaccactcctatcctgggacaggagacccagatggagattcttgggagggggagggactcggaacttggttccccggttaatgggtgatggaatttgcacaagagctgggcaaaggtgaaagggcttcgtcctgccccaaatccctcatctcttcgctctgcttcattgacactcccgccccctccctgctccaggcagctaacttcacacaaactctgacctcttactctctctttctccctacttaactctggcccagggtggccaggacgagacagaaggcagggagcatgagccagtcaccccccaacgccatacagctccagtctgtgggttcccagggcaccctggctaccctgccacggccacccgatgtccaaaatccctcctctgactcttgggcctctctgtctgggcctcctccttggggcctcagctgtcttctggctctgcaggtaggaggcagaggtgcctgggtcgctgttggctgaagagggtgtttggagggtgtaggtgtggtggcatgagaaaccctctggaaatacgtatttctgcctaatcgcccgcagcatatcttggtgttggcttctctactctgcgcctcccacctgctcctgcttcaaagtctcccagcaggaggactctctttctcccctgcccagctcctggcttccagcctctttgcatgtggcgtgtctacctccctgcaaacttggatgggcagcaggtgagaggaattccctggagagaaggtgacagggtcccagcggggaggcgaggctcagggaggctagtcactgccccacgttaccagacctgctgttcctacaggctgcctcttgtccaggctccatccttacagtttcttatccccgccttggtgctgaccagtcagaaattacctctggctctccggacacctggaaactgtgagcacagagcaagggcacagggcgag

SEQ ID NO: 64314 - DNA, 1083 bp, Bovine  19866881176691
  misc_feature (1)..(1): n is a, c, g, or t
ngccggctaggggcagcgctacctgaagtgtggccagaagcagctgcagcacatagggagcgacgcgagggccggctgcccaagacaccctgtcggcgccaccaggcccctccggacgtctgcagggaaaagccggcaccaaggccagagcccccagggccatcagaatcgagggcacgagcgtaaagaagaagcaggggctgagcccacccttcgcccagaccggacccgcgggtccctcggcctcacagaagttgcccacagtcaccatggcaatgcgtggtcaccgaccgagactgcggggactaagggacaaaagaactggagcggcggccgctcggggcggggcgcagaatcccgagtatctcgggtcatggatcctctgggcgctgagccgcgggggtcgccgggcagggtcgcacgtggacccggccacacccacccactcgcttcgcgcacgcgccgccgccacgcactcacgccgggcacgtacgctatctccgccgttcggccgctgctcgcggcaggtggccctccggccgggtccgagcccacgggagtgttcaacgtccgactccagcgactctcttcctcagcagccccgcccaccggggccgcccctggcccctactcaggtccccattggccgaaagtctccgaaggggcgaggagggggatggtgcacgcaaagggcaaaatagacgggcggagccggcatggtcacgtgctcagggcgggaaatctgaccgcacgtcctgctgaagtccttgacctccaaggaaccatggttcgggaagctgcccttctgctcgcccgctaggtcggtatatccaagtgatcgcatagaccagctttctcacggggcggacacgcagttcccagccacctgggtggttcacagactccccactcctcctgcccctccaaaccctgcccgctccggacaacaagccgcgacctagtcagtcccttctttattaaaggttgtcaagctgtacacggtcccccacccctttccgctgtaagttcggctgcgtagttcaaccgctcacccgcagcggacacgagctgggggaggggggg

SEQ ID NO: 64315 - DNA, 762 bp, Bovine  19866881305685
  misc_feature (1)..(1): n is a, c, g, or t
nctgccctactggtggggtgcccctccccagagcaatcatggtccagtgggtgacggtgcttgatgcagaaatttcggccacagcggtcgcaggtcagtttcatcatttcccgctgccggcagccagcgcgttcacacttattggtgaagatctgaggtggagtaggaaggattgtctctgctgagatctctgctcccttttcagtcctgtcctaacagctgtgcagagttccaggcgtttgtagtcccatgtgaccatggttgatccctctaacacttaccttacgtttttgttgagctggatctgagcgacagtctcggtcaatgtgctccccaacagcacggtcaggggactcccctctggccacaggtacaggcacgttacagagcgggcatacaggtacctggatatcctatagttagggagcaggggttcggtctgtggcctactcccagtccagccagatctctggtcctgagagaatccccctgaaagagcctggacatgccctccataaacgcaaaaggaaataatgttcccagcactgagcctcaagaagacaataaaggaggggaaatgtgaggcagagggcttccggagattttgcacgcatcctccacccgccccctttcatcctcagaccgccccctcaccttttggtaagcagatccacagtgatgctgggcgtaggccacatggtctgcgcagaagatgcccgaacaggcatcgcacttgagcggcagaaaatctgcaggaaatgg

SEQ ID NO: 64316 - DNA, 1170 bp, Bovine  19866881462955
  misc_feature (1)..(1): n is a, c, g, or t
naagtatagaaattctcatatacaaggccaaactgagacgtgacacaggaaagatacaaagcattgtgggagctcagacgagggaaagagtatagcttatactttgacttctgtccgtttcactatttctggcattacagaaacatcacagaaccatctgatgctctttttaagttaggagaattaaatgcccttggaaagaactgcaaaattcctagatgaaaaggctatgtctcctggggaaagaagatggaaataggcagaaatcaagtcctcaatcttcaaaatgtcacctgtgccttcactccacctgcaaatcccagagcaaggcctagcccctcgctctgtccactccgcaggtccattttcacaccaccagcataaatgtctccttctccaggggcttatcctttgttttcaaacacatatgtgttttcccatcttaaaaagggaggttgttggaccacttctagctctccagctagctctcattaccttctcactgtgaaacttcccagtgaaagttctatattcaccgtctccatcatatcaatcaacccttctttagctgcctagaatctgcagatgttgcccaagatcccgaacagcatgataatcttccttgggcagtcagtctggcctctctcctgtgcgtagcacagtggatcacctccccagtgataggaagagcaagggatttggaaaaaaaaaaaaacaaacaaattccatgacctgaagtgacctgcagtaaattacttagcctttgagcctctgcttctttaaaatgaggataatatcaccaacctcatgggtttgttgtaaggattaaaagttataccttagctaaagcacctatcactgtgtctagcacaggcagtatgtattagataactgctagttccccttccttagctaatttactcctctacccagattcccttcctatctcacccacatttccttcactggctcctacgaccttccaattacgtttgttccccaaattgagaaagattgttctcaatcactggacttttgttcttttgtccacgctgttcctagtaaaagatgcttccattctaatgccttcaaatgctgctcctttgtacaatattcccaaatctatttcttttatcaacctaagcttcaactctatttcttttttttttt

SEQ ID NO: 64317 - DNA, 1526 bp, Bovine  19866881652587
  misc_feature (1)..(1): n is a, c, g, or t
ncccccaaggttgtactgatcagagctgcaaaggggtgcaggctgccagctcccgcccgctctgagcatccagctccgggctggacccccagtcggccacccggtgcacgggaggtatgacgcctcctacctctggcattgggagatgcaggtcctgggggcctcgggccgagcccagctttgctcccctttgacgtaggtgcctgcgtcttgacccccactgcaggccaggtgtggaaccctcacccgggttctgggaccctttctcccccaggcctaacccgcccccggcctctcagctccacgcccccacatcgtcctagagctcattggttgctaggatactgcgggccgttacgccggcgcggactgatgacgtatccaatgtttccggtctctggcgcttccctgcagctaaagccgggtgagtgcggtgttctggctggcccacccagaccgagacccggagtgggctcagcacgtggtgggtctgggcctatcacttcttcccggaactaccccgtgccctgcctctgcaacccagtaagggtgtgcgagtgaggggccgcctgaaggtgggccggggttggaggaagtggcctataagtcgccgcggggactgggccctttttaaggcacctgaccccagcctttttggagctggcgttgccagggcttattttctctaggttcggagacttgggcctgagcgctccacattggccctttagggggtctgctggattgtgccccgcccatgacctgccattcttttccttccagcatgatctgctggagccccagcaacttgcctgaaagagaccactcgacctggacgaaccctttggcagcttcaggccgtccttgaggaggatgactgagacactatgggccacgcgctttgcatctgctctcggggaactctcaccattgaccataagcgctatctcttcatccataaactgggggaggggtgagtgttctggaaatcatttagtcccaagaattgtggtgtttgaaggacagcagtcagcacaggataggagcacagagcctctaattcaccggacagagcccagctccttggtggtcaagaaagtggattgtggaaccagtcttcctagagtcaccatgtatggccttgataaaacctagttgctttatctgcttattagagctaattgtgcttcaatggcagggctgtgaggactaaatgagataattcgtgtcaagtgtctcccctattgcctgattcatagcacttgataaaggttggctgttatttatttaatatttattgaagccctgcattaagaccataggacctaggaagtgactgtgtccttgctcaatgttaataatcttcagacttctttttagagtcacaccttgggagggttgctagtaaatgggaaagacacccccccccccttcccctgcacttctccccagggaattcctctggatcccagcagtatgggagatgaccttggtccttcactgacccctttggcccacagtgggtt

SEQ ID NO: 64318 - DNA, 1517 bp, Bovine  19866880350231
  misc_feature (1)..(1): n is a, c, g, or t
nccgtaaatgatatagcaatccaaaggaaaagatcacctttttaaggtaaggaatggagaaaatgggagaaaaaaatttgaaaagaattttaagtcaaaccttttgatcacagagaggcaagtctggtgaactgaagttcctaacatttgttgtacactaccctgcactattaaatatttcaagtttgcataatgttttacatttgacatttataaaaataatccttaacgtagagctaagacaagtataaactaattgtgaacctcttaagaagaaaataaagagtgcctacatggaagaaatatgcagaaagttctcttaccttgaatataccaacccaatcttttggatgtggatggatatatggagttaaagtataatgacattctaagtgtgcattaggaagataactcttggccacattttgaaagatgacatgagcaaagttggaagtctgcaatggaacttcttgaaaggatgtcattgtgaatctgaaacaagtaaattatacatatttaatgataccaactaagaaaaaaccttgagaaaatatatagctttaaaagtaaattacatggatattctcagagaattattgaaaagacatacttcttaaatactggaactcctttagatatgattaaatataaaaacacaaactgggaagtaattaatttacaaaatgtttcagaaagttcaacgagttaaaaaaacttaaaaaccaaactttcacctctcctgcaaagcctagccctctgcttctcttgcaaaccaaaagcagtgtttctatgttgaacccctgaacttgcatcactttcctccctaatccaacctattgtatccctccacgttaggttctaggctcctgtaacctagagcctagtcaacctctgtgtcatgcattcctgacccacattcacgatccccaggttttctgaaccccggctacatattagaatcattaaggggtcttagacaatgactttttgggacctgggcactgcatgcaagttcgtgtacacacatttttttttaagcctcccaaagtggtggttcagaggttaaagcgtctgcctgcaacgtgggagacctgggttcaatccctgggttggaagatcccctggagaaggaaatggcaacccactccagtattcttgcctggtgaatcccacggatggaggagcctggtgggctacagtccacggggtcgcaaagagtcagacacgactgagcgacttcacttcacttcaaagtaatcttaatcctgtatacagccagcacagaggactactatttagactatgactcaaaccatcaatttaagtctccattagcagctctcacagattcccagacctgggctgtcttcttgggcttctggtacatacttgttcaaatctcacaaatgatgtaaaaatctcagttggtctacttgaaatagttcggcctactcgttcatctctacctacaacaattctaccctttcattctatcttgattccaggattattgtatc

SEQ ID NO: 64319 - DNA, 673 bp, Bovine  19866880362861
  misc_feature (1)..(1): n is a, c, g, or t
naaatcagttaaagaaaaatttaattctttgagttactactaaagttttaaataccattgaatcagaccaaggagaggcttactttagccttttaagataaaataatccaagtctctgatacagaagtcaatgccacaaagtacttctaagttttataataaaaaatagaaactgatcattttaaaagaactaaaaatcatcacaataatacaattctttaaaggaaagaacccatgaaaatgaattatctgaatcatgttaaaccaacttatttcaaaacattaaaaacaatattactgaggtaagactaaaattcaacaatgaataccgtacaaaatactactgtgtaatcaaatagcttatgagagcaccaaagacctcctatgatagctctttcccccaacacacacattacaaaccacggtaaattaagttatatgaaatttggtaaaagaatttgcttttggacagaaatagcaatgtttcagcccaaagcaaagtaaaattgccaagctataaacctctctaagaaaatgttttaatggaaatgccaagagacccttaaccataatggtgtggtgttaggtgccaaaacataaataaattttgtttttgtgctccctttaccctaaattagatacaggtcgagtggaaaaacagtagggtatccaa

SEQ ID NO: 64320 - DNA, 3879 bp, Bovine  19866880438064
  misc_feature (1)..(1): n is a, c, g, or t
nagtctcctagaataaagctgtgtttaacaggtcccaacacactcccttttatactgatgacatcctacaccaacccctctacctgttaacaaagacaatacctggaggaactttcaacttaaccacaagtaagaggcaaacactttcaacagcaattttttttttttaacagataaacatttcagtttgtttccatttgttaaaaaatatatctaattttgtgataatacttaaatctaggtatctctttaaagttgggttaaaagtcaaaacatcttagaatgctcaggagtaactcagtaggaagtaatgacgggctagacttgaagtgatagaaatggaaaataaagagaagacatgaggacactggcctaaggaagttgatgggacccagtgaggggggcaatggatggagaggagataaagctgccccctaagatggatgagggcttcccaagtggcactagtggtaaagaatccgcctgccaatgcaggggtcataagagacacaggtttgatccctggtcagaacgattccctggaggagggcatggcaacccgctccagtagtcttccctggagaatcgcttgaacagaggagcctggcaggctgtagtccatagggtcgcgcagagtcagacacaactgaagggacttagcatgcacgcacaaggtggatgaactgtgcctctgacagacccagacaaagggtggggctcatcgtggccatgagtttgtacaggaaagctttgggcacagtactgggcataatgagttataaacaccaggggcatattcaaatgagaatgctagtaacagctggagagtagagatgctgaggactagacacacagataaaggaactgttgggtagagttgatggttgggttatgagaacctatgagttttctgaagagaaggtgtaaacaaaaccacctggaagtggatacagcaaaacacaaggaaatagagagaggacagagaaggtaggagaagagccagaacacatcatccctaccgctggccccctctaatgagcacctatcaactcgtcttgtctctaagtagtttattcttctgtatttaacatggggaacatagcactgccataaccacctataattattccctgttaacaaaagggaccaaaatcaaagttatcattaacaacatattcaaaatgtcagatgtgtcagatgtgcttcaaaggtatagaaatactttgattattaccatacctagtcacaactgaacaggaaatcctggtgtgagaaaatactgctgtattcctcaacattcccaacacaaataggggttcccaaaatcaatgccaagtttcctctagcaatcttcatgctgtatcttttaagccaatcttccaaatctcttctacttctcaccttcaaatgacaacatcagcacctcttaggagaatactcatttctgcatggaatgaatacaaatctttctaatcaaacttaagcctctgaaaacctcgtttggttctcagaaagattcgggcagatacttcaatcttgccagaacaaacatcatgtgaaagcaaatataaataagacccatgacaaaaaagaaaatcaactcaaggacaataaaatctgccattcacaagctaagagacatttatttgccattataaataccaccattccctaataatttggctcctaacactggctaaaggcagaaccatgaatggacagatgatttagcattagaaagtaaaccttcagtctcaagagatgtttgtctataatgtgaaggttatgttgtgaagactcatccattaaggtccaagttagacaaatatacaaactgtctaagggaggagatgagcaaactcccagtacccatctggggtcagttctcctccaagccatgggccttcctcatcactcatgtaaaagggacttgattttatgtgctcactctttgcaaggcaaagatgatggattttgcaactctgaggatacctgactttcccccaaaaaaaaaaaaaaaaaataaccctcacatcacaagacagatgaaaaaaaaaaaaaaaactctatgagttgttttccatttccactccattgtaaattgaggctgagcctgagatcacctcatgattcgtggacatatgtggaagtagataccaactcttaataatctctactgagattgtggtcattaatcctaaatcccagggaaccaaaactcatgaactagcttccagttcatccactggtttagtcattcccctgagtgggaggcaaagaccaagccaacttctcttctagcatcaaattccatctaagctaagggcaaaatttaaatctataaggagaaagcagaaagtgcttacatgactagtgtgctgaaatggaggaggaggacaagagaatccttaagatataagggttagattttccagttattggggtgggggaagaaataggccgtcacctctcataatgttcccaatgggtgtttcctttcagtcatgctgatttttttttttaaaggcacgaaaagatgaaaaacaatttcatctattagaatttagagaacatggtggcattttcaaacctaggataaaaccaagtttagatttcagaattttctttttctccagacttgtaaggcatgggctggggagaaaaggcagggagaggggctgtattgcacaaatatagaagcaacatattaacataactggaaatatacagctgttgcaagttttctcaacttgctatctcttatttttcacctggtgccacccacacgttgccactcacacctcccccagagagcaaccatgcccactagtagctgatacagcaagactgtaacgaaggcgaagcacctccctctctgtgctctctccccaagtaactggtggtgtcgggtaacatgatttccaggtacagaatataatcagattgagcagctgacttttctgagctgaggctgacctggccatgccctgttccatgactcctgttgagctgggatccaagatcttaagattgtagcttgtcccctgttcccatgtgttaaacagtcaacaccctctgggaatagattgcacttttcatcatttgggtaggaattctagaggatggaaatgtcctaatttgctattgctgcatcagcataatgagtcagatttaggtcctaggggagaataacaacacttagcacttatatactgtgcttttcatcttcagggtccttcactatgttaggctgtaatgttatatttctctcagcaagataaaggagttcatttctagtactttcaactcctcttacacacacacacacacacacacaactgttaccacatgaggaagctatctcctcctagagaggcactgttggagctcttttgtagaaaaagaaatcaaatgtgaaaggtcaattcatactttaaaaaaatcttttatttttgttttttccactaatgtggaacatgatatcaacatgcagattgtcagttactggtatctattcagtattactgcctgggttcccatacttaactctccatgtctcatagtcttctatgtcatctttgaccactgaggagaattgaagactgtcttggaggattctggaggactctgccaagttccatactcagacctcttctctgcctcatctccattcacccctgcccaggtcattccattgagtctcatgcatttaaacaccatctcccaggtggctcaatggtaaagaatctgcctgccagtgcaggagacatgggtttgatccctgagttgggaagattccctgggtcaggaagattccctggagaaggaaaaggcaacccattccagtattcttgtctgggaaatcccaggatagaggag

SEQ ID NO: 64321 - DNA, 759 bp, Bovine  19866880438710
  misc_feature (1)..(1): n is a, c, g, or t
nctatagagaatcaaccattccatatgcacagggcatggttctccctggagtggaatttactctttaattaaaagccagtaagtccagaggacgaataaatcccacagagtccaagtaaagtatttgactggcaaacttcctttcaagtcattcctaacatatacccaaagcctccgtcatattctctcccttctaacacccacctgtaggctcagatcagagacatataggatgtcccctgttctgtaagcatttctcgggcttttctctatactttcagtttgaccgagatagaaatgtgtgatctctgtgttctctgacagccacaaaccactgttgattcaggcatgcttgttgtagcatcatcagattctgccgaaaggcagtagacattaggaggagcaacacctaaaatctcacaagagcaaatagtgcttggactcttcaaccaatgttattaacagatttttctctgtaaaatgcacccgggtagctatagtctgtgaatgttagactcaattaggagaacggcactaatgaggtcaaagcagctcctctctcctgtgatcacagactgcacccctggccctggccagctgtctggcaatatgtgcttctggtcacaagggggtccatgggagggtgtgtgtgtgtgtgtgtgtgtgtgagtgtttgtatctgtgcacatccatcaccgttaatgggaaatcacccctaagttcacacccagttgagggacagatcaggcatgctgcctt

SEQ ID NO: 64322 - DNA, 2114 bp, Bovine  19866880450394
  misc_feature (1)..(1): n is a, c, g, or t
natttaaattttacggtgcaaaaaatcatttatgattcaggtttagcgaggggttctgactccacttagctggcttttagggaagtttgcaataaagaaggggacctggtgaaagagtctgccccaggaacaggtcccagggctctttaatgagagacatattggggctccaacttggagccaagttctgtttatcactaattgcaggggtgccttgcagatcttttctattatttcctgattatacccctgctctttttattatcttgccaaaattcaaacagtaataattgcatgatttatttataaccccttctattgtgccaatcactgtatttaatagatttttaaaacagtgatagcctttaccaaattaatggatgtcttttatcttccacagagaagccatgtattggtgaatctaatttggcattcttcagagtgtttctatgaccctccctccccagaatcttgtgtttttgatcatataaattagggctgattttggtgcacagagagagcttgcatgcaaggaagatgttttaggaaaggatgttaatgtatcctgtaggagtacatccacgttggggtctatgactcctgagtttctttgcaactcaattttcgtgatttctctgaaaactgagtttagagataaagatacatgaaaagcccattttatacaaatttagacatagtggggaaacctgacaccaaatgaattggaattgagattatgaactagtaatcataaaattcactaccattcatttatgggtccgtactatttgtcagacacagtgacagaagttttgtttgcattattccctgatcattacaacaacactatgagtgtttttaccttcatttaacataataagaagctaaagcttatttagtttactgaaagtgaccaagctcaaagttgcagatccagtatctgtacataggtctgtctgctggatggagaaggaagtggcaacccactccaggattcttgcctagagaatcccatggacagaggaacctagcgggctacagtccacagggttgcaaagattcggacacgactgagagactaacacacacacacacacacacacacacacagagtcagctggaaaattcctgtgcttcccattatttcagatcacctctattgcctctatcttcatccccttatggtacctgtgtgttttaacatacgtgctaatttactttaaaaaatgctcagtagaagctttgcaaagcatcatgctctgcttgatctgcacaaatacatgaaaaaatcttgagtgcacccacccactctaccctggtctttaaaaattctcctctaggcctccagtctcagccccaaattcttccatgttctgtagcagtggctgcagtaacacagctgaccctgaaatctcagggaaaaaaaaaaaggctgcttctctccacaatacatttatcaatgtcactgaggtcacacagtccccccccccccccccactgccctgcttaccaaaatacataattcccggtccaacccagacccaggacaatcttctcatctctagtgttgtaacatgctcctgctgtgggacatttccttccttgcctggtcctgatgacctttgttttcctggaataaaatgaacatttgctgagtggggctgtatttggaatttacgttagattctaatagagtaatacccgggggaatgactgcccccgaggagagagcactctaaagagaatgctgctgtgttctcttaggacattgctttggattgggcaatgggggttgctacaccattatttctggctgtgataggaattggggcagcaggatagagtaatttctgatacataggctgtggtcagtgttatatttatatttaaccgttggattttaaaagaaaactttgccatgaacctctctccaacttcaacttcctccactggaaatatttctattctgtcctcccgattcaatccagcaaacttttattgaaggcttaatatgtcccaggtgttgtactaggtgggccaggtgccaaggctatgttctagtaggggagccgctagtctaagggtctggggggtaggtttggctttcttgatgg

SEQ ID NO: 64323 - DNA, 4165 bp, Bovine  19866880460054
  misc_feature (1)..(1): n is a, c, g, or t
naaacacacacatatagaatctaggaaaccagtactggtgaacctatatacagggcaggaatagacatgcatacatgagaacagacttgtagacatagcggggaaagaagagggtgggatgaattgacaaagcagcactgaaacatacatatattaccataggtaaaatagataactagtgggaagttgctagataacacagggaagtcaacccggtactatgtgacatcttagggggttgggagggagactcaaaagggaggggataaatgtatacttacggctgattcacactgttgtatggcagaaaacaacccaacattgtaaagcaattaccctccagttaaaaataaattaaaaaagaaggaatgggctcaatttgctcctgtctgactgtggggactaagactccagagagtttaataggattcaggacttcaggagtcacttttacttgtgttgtgtgtttgcccagtctcgtccgattctttgtgacaccatggactgcaatccaccaggctcctctgtccatggaattttctaggccagaataccggagggggttgccatttccttctccaggggatcttcctgactcagggtagatcctgacctgctttggtgggtagagtctttaccactgagccaccggggaaacccttattttacctaagacccttattaaagaattcaacacagctcatgcattcaagaaatacaagtcagaaatagggtttaactttaaacatcgttaatgacaacatatacacaggaaaactcactccctatacccaatagttgagtttactctgagtggaagtcatataattgatggcaccttagaatcctccttgaatgccactcttaaaatccaagccaactcacagggtaaatgccttaagggaagcacctttggtgcctgaggaactaaaagaccttggctctgacctaaaactagtccacagtattgcaaactatatccaagagtgaagacattatggtcatgttttcatacactgtcatacagtgagctttttcagagcttcagcctcatttggcaactgatgcctcttggggaacaaaattacttccatcattaaaacttcatcaagtaataattttatgacagttgttaacagaaataattgtagtcaacaagtacagtgtgatcgatttgttcttgctatctcaagagagtcattatttagctctgatagaccaagtcaggatagtatttaatgaattgcaaactgcatatcaacgatccaggcgggtgtgttttaatttgctttaggtttagcacgttctgtaactgtactatatacgcaggtccgcttcaaaaatgagttctcacagaacagccaagtctaaatgatgatgtgtcatatggcatgcagatatttttctgctctcctctgcttcccttcctgacaccaagggtgggcgtggggctgttctaatgaaacataaaatgaaattctcttaaggtgggaaaaaaggagtgggtatgtgaataaatatgaaggcgtcccctctttcaaagtcagcaggaagtcccttcagccctcttcgacctgtctcagtagcacaggacaaactttccattagattaataccccccctttattattctaccaacaacagaataagacagaacctgctcaggcagattaatataatgattgaagggagaatatatggtgtaatacagagaggtctaaatgtaagtggaaaaaagcataaatgactattttaattaatttcctaatgtaaaacacagctgcagtaatgttggcaagtctcacccggctgctttaaatttgtgacatgaaatcatgccacttaattaagtcttaatgcacaaaaatatattttatttactttttatggaatataagcatttaaagctttctatttatttgtgtaaacgctttataaattacttgaaatactgaaaaaaatcagactattaatcggcagttacaatgtacccagtttcagtttcaataatgaaatgcctttttggtgggctcctgctgctatgtgaactagctctaggctattaaagtaatgagtccggacagagtcatccgatctcaggcttggtacaaaactcaaggaaaaggactttgcccacaattcttagtctgtttaccagactgactgttggagcattataaagtctctaggcttccccttcccccttctgggaagttttttttcttttgcttcttttccaagcatgagctagggaaacatggtattatggagccctctgcaggtcagaagttttgtaggcgcttaatcacaagatttttcttagagtggcagtaaaggggaaaccgtccaaactgtgcacattggagctcattgaaaagttgttcatctcaaagtcaggctgatgctgactctttcaaaagggcacttctgtcaactcatttaaggcatggagccttgaccgaaacgtttctgcaggcccctgagaacataataacgtactgcagagtattgggggcagaatcctcctcctcatcgtcacagttcttaacgatcatccatgaagaatacagggctctaaatagttcacttgaaaaaacgtaatttctagcacatctgggtttttaaggccagggagaagaaaccaggagttagttatacagacaaacatcatgatttcttcagccaagttttcattttaatgaatgaaatgtatacctagcaaaactcagtaaatttctcaagtgttttaggaaacttagtataattttttacagggcattttatattgttttaaactttttggatggagcagatataaatcactactcaaagaaatccatatgtaaagataaaataagaggaagtgcactgaagacagaacaaataaaacaagctctcgttttcattgagacagtacttctcgaaccacattttatgtgggttataaaatattctccaagtcagcaaaataagcaacaacttttaataggaaattttttcataacattttcaagtcagcaaaagtacagacaacttttaatagtgtttttttttttcccctcacaacagtcaagagagtattaatttaaatgaggaagcatttaaacaaaatatttccttctactgcattcactctgtgccaggtaactcatataccttctggagaacccagagatgcatgtttctatcaagtttcaaagtaggtaaggccgtctcctcacagcttctctccctggcaggaaaactacagtctaaacttgcctgggagctaggacaagaagaatgaatggggaatgatatgatgatgaaaagaaccggatattccataagttaaaatgtccttcctcaggacttgtaattgggttaacaggatctatctgaaagacctgtagggagttaagagaaggcagtactctggggcaaggactaaggaccaaggtcgcagttgtttgcagcaaacctctagatgattctcagaagtttctgggagactctgaggacagtctaactaacccaccatgcattctctggtcatcggactacctgcggctgttcccaagaatacatactcctcattggaggtttgtctcctctcctctactcagtggtgtagacaagctcagtgaaggataatgtcagcaaaggttttggttccagtacaacaactcttccaaacacagacccaaaatgaaaacgttggagttttgagctttgttgagctccgaaacaagtgctctcagcatgaactgtcaacagcctgagttaaaatagggcagctgctggctcctgtggaaccatctccacactccccagcccaacctcacagagctgaatgtcagacatgactttaccaggcctggaatccggctgccaggctcagcctccttccctgggcttatctcccaccgggaggctgtggctgacttgatggaactgcacgcttctcagcagatgctgggctgccagcaacaggagcaaggcctggcctggcgccgccgacatttacagtcatgcctcctgcccctgctccccggccccgaccccccagcaccggcctgcatgcagacttggcccactaggagaggacaggtgatgaggattaagtcgagcatatttgcatatcctcagcgtggggaaggaaattaacaccacagtacatatttag

SEQ ID NO: 64324 - DNA, 815 bp, Bovine  19866880464727
  misc_feature (1)..(1): n is a, c, g, or t
nttatataccatatgattccatttatacaatgtttttgaacaggtaaaattcatctaggatgaaagcaatctgaatgctggttaccttggtagaggtaagaggggaggaaggggacatgagggagcttttggggatgatagaaatgtctatcttgattcaggtgttattcacctggacactcatatatttgtcaagctcctagaattattcaattcatatatgtgcattttaccatctataaaatataccacaatgaaaacaaattcaaaaaaacatttcctggtgtcctgatggcctatctttcctcattcagcggcattggctggctggctggctgaggtgattgacaatgcaggtagttctagtgtagaggccgaagagcaaattgctatttgttgaagtgctatacatttagggttgcctacgtgccatgttattaatcactttactatgtgatacttgctctaaaatagagatgactcaaaagtacattatatcaataattgggggtattttcttcctccagaaatttttttaacaggaaaagtgcagaccaaattaatccctgcttcatttaaacagtcttcaaatggattactcttctttgtcctactcctcatgaattccttttgttctagaaaagagcaaatttaaaaatacagtagttgagctctgtgcctgtagtgtacttacatatagcgatgcatttctttcaaatacataatagtaaatcaaactgttaaggtgactttattaggcttgcctccaaccccgacctcttttatgcatgcagtggtctgtggtgtgggaggag

SEQ ID NO: 64325 - DNA, 1471 bp, Bovine  19866880485409
  misc_feature (1)..(1): n is a, c, g, or t
ntgtggcttctttttcagaatgtaatgaatgaagatgccatccatagagaaaggctgcaaaggaaaggtagacctgggatggatgtctctatagctctagaaggctccacaccttacccattggagggattctaggaaatgtttatggactcacttgatgtaaatacatttcatggagaacaaccagaatttgccaagaaaaggtaccttgggtacctctatgaactcttgactacttttaaggataactgtgcccttcttggcgtaaatcacaacacaagaatgaaatcctcatgtggatatatcatgagaaaaaaaatttgtatcttcatcatgggagcagtttagttcaaacttggcaaccttcttcgtaaatgtttatgaaatccttttggtcaagaccaaaatagaaatcaaaacttattatcctttcccccgaaaccaaaagagtgacattatttaaagtttaagttttaaaccaacacaaagataaataaaaacttttaaagtcaagatggtaactgacgaccggtgcttcacattataaatagtagaaaggttcgtaggaactcatgcactttttttttaatggctcaagtctcaatctgacagataatgtaaaatagacaagatcttcccttctcccttccaaaaagtaggaaagccaaaacttgaaaggattaacagcccttgcttttatacagtgttgtccataagaagccacactcaccttggagatttacctgcacaaaagcatcattgcctttctcagaagggcactgccatatcttctgtggtttcataaagccctataattggagtagccaggctgaaattttccaagtctccccttttggcagtgaacctggctacagaaacatcttagttgtacaagacatttaaaactgtttatctcttactcctgtccacattgatttgtttgtattccatgcctgccttccacaagcctataaaatgtcgaccacactacagtcagggctgaggctgcattctatatctgtgtatttaaactgaacactccttttcagttctttaaaaactttatccaccctgtgccaactgcttaaagggctatcttgctccttctggtttgcttagatctgaatctgagatgcaaaacctccagagtccttgttcttgttctctgaattcatcagctcgcatgcttttataccctgatactttcgtggtcaagctatattattaattcctgctattttttaagtcttaaaagtcagagtgctctaaactatgtagaatctgaggttggtgctttgactgggaaggctgtgtttgactgcagacatctaagtttcagggaatatgtctgagtattacctagtttgaaccttccaccttattcctgtggtttgcttttcacttagaaatgaactgcagtcattactgaggtgaatgtataatctttaccttgctagcaagcttggttctg

SEQ ID NO: 64326 - DNA, 5248 bp, Bovine  19866880518487
  misc_feature (1)..(1): n is a, c, g, or t
ngggaagctggtggtgctgctctctccctgccccgccccagagatggaccggcaaagtgactggcacgtagttgtcactcaaagagagtgggaacctgctcaaagtcctgtccttgtcgctctcggggtgggtcccccttgccaaccaagcgcaaatctgccccccacctcaagcgcccccaccggcctcctgttccttggggtcccacagggcagtcctgggctgggccagaacctcagactcgagcccaagccctgagtggaggcctgggcatcgggttctgactttcaaatgtggaggggttcggattgctgccctctgactcactccctcagggcccacccctgtctcaggagcccactcaccagggcaccttctggaactcagggaggctgctggtgaggctctgggagaggtcaggcagcagggggcagaccagcctcccaggaccaccaatcaggctctgcctggccctgccccaggcccgcccccaacccccatcagggctttccctcattcattccttcctttcccactatggcgtcctcaaaaccagtagggccctgccctgccaggtgctgggccttgggcctcgccaccctctgggttcacttctgagctcctctaggagccaggccctgggacggggcttctccagagcatcttactgactccacccagctatcctcggaggcagacctcactatcagccctattttgcaggtggggaaactgaggctctgggtcacaaagcagggggcacaactgggattcgagctgtgatctgtgggcttgcaatgtgcatcttcctggctgtccgtggcagctgctgcccagcgtgccgcgggcccagccccagccccagcccgaggggaaagggtgtgcacagctggacctcacagaaggccgaggcttgcaagcagctgacagtcccagggctgaggccatgaggtggtggtggcggcttagtcgctcagtcgtgtccagctctttgcgaccccgtggactgtagtctgccagactcctctgtccgtggcatgcattttccaggcaagaatactggagtgggttgccatttcctcctccagggcatcttcaccacccagggatcgaacccgtgtctcctggccggcagattctttaccactgaaccatcagggaagcctaaggccttggggtaccgaggacaatcgcagcacggcccaagccttccagcctccaccttggaaaacggtgcctccagaaggctgaggctcagagagggcagagcccccatcaaggtcacacagcacagcagtggcaaagacaggactagagcctgagtctccctcctctgctgtggtgggacagtcccaagcactcagggcagaccgcccccctccccaccccacccctctattcctgtcctcctgggttaccccagccagatcgccctccgtgtgtgccgacggctggctcccggccagacccagcactcctcctgttcagctggaccagcagactccagggaacgaaggggagacggggctcatcctccacagcatccacacagggaccccaagcccaggatggtgagccttccagcctagggcgccaccagcaggcaggcctccatcccagggcatcctgctcccccaggggccatgcgcagggcagaggaagacactcacctggggccaggtctggctgccccttccctctccctgcctgagccacgtctgactcccaggctgcctctgcggtcactgggaaaccggaacgctccaatgacacccaggagtgtgctggctggctccctcttgcttcagcggccgtgaatattcatgagttccctccctggggagagcaggtggcatatccctgtagtatccctgtacactgtgggtgctgccccggccctctgccccctgggtggttccccctgaccctctctggacctcagcagcccggcagctcctccatccaagggctcagcaaggtccccggcgtccttggcccaaggacactggcagccgcagagccctgcagagagcctgggactggcttgaaagccatgggagggacacgaaggcaggtgagcagggaaactaattgcttctccaatcacatctcatgttaagtctcaaagctgccctctgagtcaggtactaccgttagccactccccaggtaaagaaacccaggctcagagaggtgaattcacctgtccaaggtcacacaattagccatgagcagacagaaccagagtcaaaacacggacttgccaaactctaggtcttagagatgtccaaggcacgaccggagaccaaggttggtctaaaagctgggagagcccagagagccaggacctcaacctggatggtgccctggaggcaaagtacctgagcagggctggaggacgagtctgatgagacttcacctctctgagctccaggttcttcatcaaaaaggtacagaaatgtgcctctcctgcctccacccccggtgaggtggtggcacaggacacccctggatcagcctccagggatctgggctgatcagagatgcagatccttcccaaagtctctgtgggaacaggtaggtctaggggccctcaggctcagcccaggcactggaatctctcatccttgctcagcgttgctcatggacagagggtgcccagaaaagcctccccgctacaccccaccaaatccttccttcaacactgatgcccagagccccaccatggcccacgcatggggctttagggaccggagtatcgccatcaattgatcataatcactactgtgacggtcagtgatgccacagcgagcactttcataaaccgagcagctgccagtgcctccgaaggagcagcaggcatgtgaccctgtgtgctcagcgttctttcccccagagccccgcccagcttccacggaacaggggaagcccagagtcctcctctccctgggggctgagctgagtccagggccggcatcaaagagcagataccgaggtttaggagcgtggactctggaccagagtctagtcttgtgctcgggactcgccatgcatcacgcaccctcataacctttgcagggagccctctttatcccccactgtactgtagacgagaaagctgaggcgcaaggagaggaagtgacaagcccagagtcgggaggtaggggggcagatgtaagatcctcatccaggtgggagtggagcgcaagcttttgagcaagaagtgaaatcgtgagaggagtgggaatctagtaagaagagccaagttaatattttatttacacgcatatgtatcagtaacatagagttttggaaaaataaagcactgcaagtttgggaacttcctggtggtccagcggggaagaggatgcactcccagtgcagggggcccaggtccaacccccgtcagggaactcgatcccacgtgctatgaccaaagatcccatgtgccacagttaagacccggggcagccaagcaaacctttttattttaacctgaaattttcatatttctaaatattgttcttgtcctagtggattgaggccaagcataagggaaaatctactcattgcttctgctcttaatatttctacttggaatttgatcactgcattttctctttgacaacaacactgctctagtagccagtgtatgcagtgcattgtataatttgattcaattaatttggttgaactaattttcatactgttctttattagccagcctttagctggggttcgatgtccacaagcacttaccatgaaaaaacttcattttagaatggcgaatgatcaccccaataagagttttgttaggaaaattatttgagaatgatagaagatgcctaaggaaacttctgatccagtgactctcaaaggaacagactataaaataaattgggagagatagagggaaatttcagtgtagtataacctagacttctacttttttattatgtattcatttatatccagaaaaacaaagatgaaattccctctcgtcaacaccaattcattttatatgcaattttggttccagaaatgtacattttcctctcccataaaattagtctagaggctagacatgaaaacaagttactagtagccagtttttcagttataagtgacccacaacttaaaactcactgcaatagagacacaacagtccgaacagcttcctctctgccagcccttttattaaggcttcgtaaaaagtgaagggtatgcgtgcacgggtttagtgactcagtcgtgtccgactctctgtgacccttcggcctgtagcctgccaggctcttctgtccgtgggacttttcaggcgagaatactggagtgggttgccatttccctctccagcggatcttgccgacccaaggatcaaacccacaccttttctttctgctgcatcgcaggcggattctttaccaactgagctgtggtatagaaaatcgaaaaaccaacaagcgctgattcaaagcaaattcctcttttaatcacaacacggtaacaggtcaagagagtttaacatctgagacaagggcaactcaataaaacaatagcatcttgatgtagtaattaagaaatatgactccatggctgtcatggatatctcaagcactttggatctttttattgcttttataaaaaactccaatacaaacactactctgattggtgctatgtttggtaagcagttagcgtattaaaaagcagatatactagatatgctagataagcagatatgttggatagcatattgaaaagcagagacattactttgccaacaaaggtccgtctagtcaaggctatggtttttccagtggtcatgcatggatgtcagagttggactatacagaaagctgagcgccgaagaattgatgcttttgaactgtagtgttggagaagactcttgagagtcccttggactgcaaggagatccaaccagtccatcctaaaggagatcagtcctggatattcattggaaggactgacgttaaagctgaaatccaatactttggccacctgatgtaaagaactgacttgaaaagactgatttgaaaagaccctgatgctgggaaagattgaaggtgggaggagaaggggatgacagaggatgagatggttgggtggcatcaccgactcaatggacatgagtttgagtgaactctggcagttgatgatggacagggaggcctggcgtgctgcggtccatggggttgcaaagagtggacacgactgagtgactgga

SEQ ID NO: 64327 - DNA, 824 bp, Bovine  19866880528672
  misc_feature (1)..(1): n is a, c, g, or t
ntggaagttctatgccagtgtccaacagtcttcttattttttcttcagtccacgctttatcagctaagtaccaagagctttcttttactctagggataaaaatgaaaaagatgagctaggagttcgccacttagtgtgcgtaagtgattttagtctaagccaatataacttaggtaggtcctgggctaaatgcagctggtaagatgccatagtcacagctttagaagatagagagggggaggaatcagggaccaaaggaaatgtcttaggatgctcagcatcatgtggggagctgagacgaggtgggcatggggtgggaaggcagagacacaaagggagatggtagaaagctgtttagagcgctgatagtcgaagaggcccttagtggtgatgtcccctccttacctggtcatggtgtctctccttgatcatggttatccaaacctaagtatttaaaacattccttctctttgtgttgacttttagacctagcttgaaatgcatgaagcacagagacagttcttttgcttcagggaaagccctgactcatattctaaacatattggacagattcttattaaagtgaaggtaaggtttcacttaccacagatggaagagacagccagatccagtgaatgaggtagtgggtttgattctctcaagctgtcactcacactagcaaaatgaaatatgctgtttacaaacatgctggtgcagagaaggccttcggcaggcacagcagaactacatatttcctttctctttaattcccaaacttaaaaaatacatgtgttctttgggactcttacaaagattgcccaata

SEQ ID NO: 64328 - DNA, 3000 bp, Bovine  19866880568901
  misc_feature (1)..(1): n is a, c, g, or t
nctgctgctgctgctaagtcacttcagtagtgtccgactctgtgcgaccccatagatggcagcccaccaggctcccccgtccctgggattctccaggcaagaacactggagtgggttgccatttccttctccagtgcatgaaagtgaaaagtgaaagtgaagtcgctcagtcgtgtccaactcttagcgaccctatggactgcagcccaccaggctcctgcatccacctgagagcttcctataactatgagccacgaatggctttcacatgtcaccacatattcatggttgtaaatttcttactgtgttaaaatttaatatttcctacaaacattcaaaaagttataaccattcaaattacatttgaacattgtttgtagggctgcccttgtaaacttcttgaatttagtgatatcaaaaggttatatttggagtatttataaaaatccactgttcagtgtttttcctagcattttgtttttcttataataatgtaatacaaagaaataaaattgattttttcccccactagtccctatacgtgttgccagatcatctctatgttaattcagtgtgttgaaatattatcatttactgtgttctcccatgatgtgaaacatgttggaggcaccaacagaaagcactgcaggccagattctatatccggtagaactttctaagtacatacttgggctctcctgccccagacctactgaatcagaatctccatggggtttgggttgagggaggaataaacacaccatcatgagtgtttctgtctctgtcagttctcctttattttgacttggcgactaaacaataacagttttaacacctcagtcactttgctctctgccagggacctgcagtgacttcactgcaagtgaatctggaacttggcacccgggacttgcagtgacttcattcaacctccgtgggagctctgtagcctttcctttcctcctccccaccttctctttcgtgaaagagtgtggcctctctctgcccacccacagcatccacagcatgctctcggcagaccttcctgaccactttgtccacagggctgctgcctcctgctccactctgagctccttgagggcaggatgttttccttgtccttcctcacacagagcctagtcacatggtgcacgctcagtaaacacagtactgaatgaatgaattcctcagggcagagcagctggagaagcaagtgctaagtattccctggtcctctgattggtgcagaggcaagggaatgagtggaccttgctaagagttccctttggtcttttccttgaaaggttggaccatttcaggcttggatgccctttgggtcctcaggcactgatgggagcacatgaaagtagtgttttatggcaggatctgaaccaggatatggctcattagagggaatggggaagtttgtttccagtgcgaagcagaaatagtggggcaagaggttatcaaagcggggccctcaggggagtaactcagcccttccattttaggtctaccataacccagtgagtcacctaaccaatgaataaattaatcaattaattaattagccaagtaattagttagttaactcatcagttaactagttatctaatcagttcacatttgtgtggttgcagtctccagacagcgtcagtgtatatttgtgcctcctgccaaccccaggagggtagttagctgggggcttctattttatagataggaaaggtgaaggcagatctgcatatctcctaagtggtgagtctgggagtgagcccaggcctctggacttctaattcagtgtccctttccctgtttccagcgtccatagtttcttcagggcctgttggtctcggcaagtgctctctcagctcagcagtgaaacccaggacccttcagagaaagctggagacagatattctttagagcaccagtttggatcaaaagcctactaggatttacaaatcagatttccttgctgtctttgaaaagtgtctttaatatgaaaagcttgtcatgcctgtcaaaagaagctcacgacaggtgaatagcaaagcattcggaaaatgagaatgaagggtttttatgagggagggaaggcatagcaacttaataattactgttgaaatagtcacagcaatgctgaagcttctccataatttaatctaacttaatactaaccgcctcctccctagtggcaatacataaattaattaatagtaggttggatttgaagctgtgcctttatatttaggccattattaacttgttctctgtgcctttcttacttggatgggtttgttctcagaaatgaaagtagcttctggttcttatttctgttgtgacttctaccagcatcaggattttgaaaacgtatgctattctatctagtttttactcccttcttgtaatgaatgcctgagtcctacagagaggttacatcaccttgctttgtagcgtgtgatagctgtggttccacagtgtgggtcttgcctctttagtttttctcctaagaggcaatttgttgttgttgtttagtcattcagtcatgtccgatcttttgtgaccctataggctgtagcccaccaggctcctctgtccatggaattctccaggcgagaatactggagtgggttgctacttccttctcctggggactttcctgtcacagggatcaaacctgcatctcctgaattggcaggcgggttttttttttttttatcactgagccaccctgggaagcccccaggaggcaattagtagaaagtggtgaagactctgggctctaagtgagataacctggagttgaattttggctctactacttactgattttgtgaccttgggcaaggtgtataacctacctgtgcctcagtctccccatcagtaacatgggtgataagtacatctacactatggggttgtcatgacaattaaataaattcctacctgtaaagttcttagaagaatgtccagtgtgttctcagaaccaatatatat

SEQ ID NO: 64329 - DNA, 1311 bp, Bovine  19866880569072
  misc_feature (1)..(1): n is a, c, g, or t
ntggaaggaatgatgctaaagctgaaactcccaggtactttggccacctcatgcaaagagttgactcattggaaaggactctgatgctgggagggatttggggcaggaggagaaggggacgacagaggatgagatggctggatggcatcactgactcgatggacatgagtctgggtgaactccgggagttggtaatggacagggaggcctggcgtgctgcgattcttggagtcgcaaagagtcggacacgactgagcgactgaactgaactgaaaagagtgtcgtgatccacgaggcttccttgacagtgggcaactgaacacctatgggtgctcttaggttggatggctgagtcattaaacatggcagagacagcagtaccaagcccagggccggcttcacgagtggattacttcggcagtcgcacagcccgacactcaaaagggccttggcttgctttaatgctctgctccggctaattcaaaatagttttatctttgaacttgtattctgcaagtgacacccagtgagccagtggagcttgtgtgttggcaaagggaatacctgcattatgcctgtctacattccctctcttttcacatatatcattcacgatgccccatgagcacagaatgtcagtggactcatgaagcggtctaagcaagtacaaaggcactcatggaatgcaagcttctggcttccacggcgctttggtagaatgggtgcattaggagaagagaaataaaacaggttagtttctgcagtgtttccactgctctggtaagaataaatatacacacatgtacaagctgtaatgtatgaattgtataattttggttatttcacacatgaataaaatgctcttatatttgcatttgaacctggaattgcataatataaagatgaacggtaaaattcatgctaataatattaattgttaatttattttagcaagacatgaactagtaagctaaaacaccatgacaagtggagagagaagactgtcaaaaaagagcttgtatttcagtccctctcagggtatgtttaatgtttttaaataaatgtctctgcatttacattttgcactggaccccacaagtatattggaactgagacctggggatattcaatcacatcctcttgggataaggactgcaaagatcaatgaagtgcaatcaggctgctctgagaggggagaggacatcttcctttggaagctttcttttcttttgagtcatgtatcctctggggtgcttcttctcataagggactgaggcccacagaagtgaaggacctgcccaaggtcacaca

SEQ ID NO: 64330 - DNA, 1746 bp, Bovine  19866880711859
  misc_feature (1)..(1): n is a, c, g, or t
ncataaagggaaatatttgttaccatccctccttaagatacactctgtgtcacaaatacaaagtgttaaagaagttcagtttctgcacaagtgacacatactcattattaaattattactgagcacctatctataagaccattgagctgggtgtttgtggtgttttattaatatctggaaactgaattcattcattctatactatccaatcagaaactaagtcaaccttaatacaagagtcatgctactattcactgcctatatacacatgggacatgtgtatattaatgtgcatattatatgtataagacatttgaatttaaaattcaaagagactagtaacttcagagtcactgaatactaaactactgaagtttatcttaaaaggcagctgactagcagctacttaaaaaatctagcccttttcttaaaaaaagaggtttttcataacaatgacacttctcaagaaatctacgctcatagtacataactaagctttccaagtaccatctctcccttaaaatgaatatatctttaaaaaatattcatatgcctataatttaaaattaaatccaaattaaaagtctgtaaacatttgcttttattacttgctacccaggtatactcactcttcaaacaagttttcagaaaggtttacaatatgaaaaaaaactctgggtgtgttatttacaaaattctacacccctttatttccccaaatcagtcagaacattttagtcctctaaaatagtggcaatgctgcagcttccatagagaacgtgattaagcctccaataaatttaagatgcaaataaaagaaatatatacttcctcatcttctatttctacagaacacatggatgtgggggtaccatgatgatttaatacagtagctggataatgagttgtaccttctgcaacaagcgaatcaccatttaatgctattatcaacagttcatgacccaccagcaagaaatgtcaacctgattaatctaaacactgctgacctcaataaaaaaaaggcgggggggaatttactcctgttattaacatctactgttctttagtatgaacttacagaaaacaaatctttagatgaaaacagtatttttagaaaatctggtatgcaaattttactaagtgaaagttgtcaagagttctgaaaaaggaagagctaaagacaatacttaaatatcaacatttgttacaactattgaactattgttttggaaatacctgactttataagttcaatatatgttattttaaatatttgctttattttcttagcattataaaccagggctacagtaagatgtcattttggttttaaagtttactgttaaactcttagtacttatacataagttcctaaattaaaccagagataagctcagaataatctaaagatacagatactggaatgcctatttcctcccatgagcataaggttcaagagagctggtacaaaatactcactttcttggttttatttcagtaatccacctgcaattcagcctgtttctgttttacacaatgtgaatttttgatgggatgtaaatttgaaagctttgaatttcagaagaatatttaatgctgttctttttctatggggcaaacaccctaccatcaggttttggaaaggctcattagatcataaattggacagctgagttttgcttaaaatttttttttcattacaatatgtcaggtttttaatatctacaacaaacaaacaaacaaatt

SEQ ID NO: 64331 - DNA, 1484 bp, Bovine  19866880812179
  misc_feature (1)..(1): n is a, c, g, or t
ncagcaggtttcactgtatgggaatttttaaaaagagggaaggacctctgaaacgtgcaagttggtccttttcacaggcctaactatgagattcattaggcagttcacgtcttaaaagctgtttttgggaaagtaaattcttgcagtttcctgtactgattttgagggagtctttatagtcttttgagtcagcccattttaagaaagtgataatgtaaaagcaggggaaaaaaaggctcattttaaattttaataaaatagattctttcattaaaatatattaatgttctatttttatgaacccatatatgttaataaactcttcagaaaaaaattgtatgatacaagtattcaggtgccacaatattttgtcagaataaataaggttcagtgtacattctattgatttttatccttttaaaaaatgtgttcactgtacagagagatgtttaattcttagctttgattatttattaaaatgctttatgaaatgttactcaatttatattctcacctcttcctctgtggcttcttagtgtgtacagcctgattaagaaatgtgtatgttttcaaattaagtgtttgacctcccactttgatgttcctgcttttatatatacacacagaaacacaacacaaccctctccttccctatattttgaataacttgattgtaatgtgcgttgtactaaaactaaatacatacaaacaaaccttcagtattatcatgaaaactttgttttaaaaataaggaaaatttcatatttgaaacttgacaaaaggtgtgcatgacacttaacactgaatattttacttttaaacttgatacaacagtttgcttcttggctttgttgtatgctgatatttctacttatttaacatcaaaaagctgtagtggtttttctttatagattgtgcctgtgttctggaattgcctcctgctgtccatgaattgcttcttgtttttttttgttagaatttctcaccagggtttttgtgagctaagtagccaacattaagcgggggcaggggaagaatttgatacagtaggctggattagtaaaaattatactatttataattataattgagtcagccttctggctcagtatatcagttttacgtaataagaataagcacatgcaaatctcctgtaataatatgcatatgtaattacctacaatgactgtttttttatttatttctaaaatattaaatgacttattttgctgaaattctagaaatctactttttcactagaaaaatgatagaaaaaaaatccttactcttagggtgtgtgtaatttagtaatgaagcattaagattttggcttctttcatttcagttggaaatagtattggtgtaagtgagtgttgccatgggaacccccacatagatataaaaggcaagactgtctaactggaggaggaggggcgatgttctcgaataccactggcttaaatgatctattttatgtatatgtt

SEQ ID NO: 64332 - DNA, 1528 bp, Bovine  19866880812724
  misc_feature (1)..(1): n is a, c, g, or t
ntaaaattgcattttgacaataatgaagtgctgaagcaggttttgaggggaaaaataataagtaactgttaagagccatttcatttctcatagaaaactacataaatattgcttttaaggtttgctgacctgcaaacagaaacgctgtagtctgaaatgaaagtcatgtagacaaggtctctcagactcctgaatagaaatcagagggttttagggcgcaggctcagtcattagatttcccttctttctgtcttccttgagacactgaagtgggtatgaggaaggaaagacgttgggttctgggtagctgcccctcccagagtagtgaatagtgaagacatgtcctagcttcgtgcctgcagctcccacccctgaccactgcacgcggtgggaaaggttcttagatgcttcaatctaaggtggcaagcctggaaggcaggctcctcttttcccacattctatctctgcttcccctcagagtcttgactctaaggagtcctgtgtgtattgattgtaacagcagtggagggctggaggacgtgaaatttagatgaatgaagggagaggggtgaaaagtaaaaaagctttgggcctgagggggaatattctgtcataaatatcataaaatgaaaacatttgttgataaatgatttatgctggcagcttaaaaaccattttgaacagtggcagtgtcattcaaacaagtgtgatttcttaagagtcctactttaaaagatagtgttaatttggatggatgacatctgatatgttaaaatgtcagtattatttcatagctgtatttagttttaaatgtttgataaagggaaaagtgagtttcattttaccactaaaagatgaagataagatttgggattagatgggaaaatgcaggtgaaaaccttgaaacctctggctattatccacagtagtacaatggatggattaagaattcaaaaattcagagtatatttgagttggtgcttacattttaaggacagatgtccctttcttcccttaatgttactatctcaagggaagtctatgaaatggcagccaaaggaaacataattttttttcctcaaagtttgtggaaagcatggctagttgatttctaatgtcaactgtgctttcagtaggaaatttgcgggaagagaaagtaccaaactagacatatctgaaggatcaaaaagcaatcacttggttttaaagatctttgaacatcttgaagaagtgctgcttcaatttttaaaaagcaaaaactgagaatttgttgtttcatgtaactgaagagttggggagtggtctgaacctaagcatagttgaatgttgggtacagatgtaagcagattcatttctgtctgtgtcttggctcccctttccgcagcccagccctccctcccctcaaggtgcaaggtggccgcctgtagctccaggtgcagaagtgctttggatgtgaccaccctggagggtttccttccagctgtacctagtagtaaaaaacgctactgggttatgaaggaaatttgga

SEQ ID NO: 64333 - DNA, 1398 bp, Bovine  19866880939217
  misc_feature (1)..(1): n is a, c, g, or t
natacatgtgtttttacatgtatgtgtatatacaccacacatatgtgtacattatacatatgtgtatttatatgtgtgtatataatatattcattctctagatcactgtggatagtgaggattaccacatacatttttgagtattttctgtctatagtacttaagactgtacttcctgtttccaatgaattgaaatttatttggagaagtcagacatgtatagactgagataaatgatgaacgataatggggaccacagagactgattcagtgtgaagctcatgaattgcaagcaccagggcccctcacttgtacaatacatgttttaccatttctgcatatattgcttgggcccacctagacctttccaagggcctggggggaccctataccagtgtacacaggcatgcattcatggataacatcataatttgtaacttttgtaaggcataaaattttaattgcaggtaacttacccttttccactctgacttcccttctatgacgtttcttcttggctttggtgacattggagttaagagtgtttctgagatacagctgaggaagatttgaattgcagacacttttagtttgggttgagtggaatgtatttattcagctcacagttttctgtagttaagttattcctaggcctcctagggtaagactcactacccaggaatgccatccagtgttccagctcacctggggtctgtccacatggtagggatgagttagtattgcagcatgagtctataccatgacatctgctggtggaagcatggtttgaatatggtttggagccagaatcgagtctagaaaattcttctcctttattagatatataaaactgtaagtaaaagattcagttcttatttaagtatatttgatatggaagttctttctgttaagaatatacccaataatgcaaatacacgttcataactgcaccatgttttttaatgagaattttgtgtttcttcttcaattgaacacacatactcatacacacacacacacacacatcagtgacaacaaacattactgagtgttatcaaaacaaaaaatatttaaacttagacaattcactagaagatgtggaatgccctgaattcttatggctcacatgtgaaagaaataggtgtttacaaatttgacaacaatcctaaaaatttatatggcattaaaaaggacctatgaggctgaaagtaacttttctgaattatcaataattaaaaatacattttgatcacccatgtttgtggtttgtgttttatagaaatgctgttaatatgaatcattgtcatatgagaagtaatcagagtgtgcagcccaaaagaagtatttacagcagtgttgcagtgtttcagattcacatagtggattctttttctggat

SEQ ID NO: 64334 - DNA, 3020 bp, Bovine  19866880976571
  misc_feature (1)..(1): n is a, c, g, or t
natggacccggtggggaaaggaggggtagatgaatagaagattggggttgacatatatactgttgatagtatctataaaatagataactaatgagaacctactgtgagcacagggaactctactcagtactctgtgtgtgtgtgctcagttgttcagtcatatctgactctttgtgaccctgtggactgtatgtggccaggctcctctgcccatgggattctccaggcaagaatactggagtggcctgccatttcctcctccaggggatcttctctgacccagggaaggaacccacatctcctgcgtctcctgcattagcaggtggattctttaccactgagccacaggggaagccgactcaggttctgtggtgacataaatgggaaggaaatccaaaacaagaggggatatatgtatacatatagctgattcgctttgctgggcagcagaaactaacacaacattgtaaagcagctctgttgttgttgttcagtcgctaagtcatgtccaactctttgggacaccagcactgtagccctccaggatcctctgtccatgagatttcccacacaagaatgctggagtggcttgccatttccttctccaagggatcttgctgaccaaggatcaaacctgtgtctcctgcattggcaggcagattctttaccactgagccaccagggcagcctaaagcaattacactccactaaaaactaaaaatgaaaaagaatgatggtggccactggacagtgaagagggctggtattgaacaaataaagtgaaactggtcactttgcctctttcaaccaagagaccttggggcaaatattcttctgctggcatctctccaccagaggggaagctgtaccttaaaaaaaatgaaagaaagatgcctgccttgatgttcgcttagccctgccactgtgttcatggattaacataacacagggagcaattctctcctgctggcctactcctcagcacctgaagctattggccctgtttactgagcttgtttcaactccctttgatgccagagaaaatctaattagtgaagaatttgaaacaaggaattttggagagaacctcaaaacctcagcagagtgggaccatgacttccttgtgagaccctcactgtcaggggtcacttcctaatcttaaaagttaagaaagaaagtttatgcccagactgtgtgatggagctgggcctctttctgagcagaggattctagaaccacttattttgcaaatggaatctctcttcagacagactctatctgattctagactaggcttgcagagagaggaaattaccttatgcacctcagctgcaaagtcaattggaagagaaaaataggaatctttggaactgagttttacttaagaatgaaagtgggcctcaggagctaatgttctctaagtatgtgtgatggggtgaagaaaaaaaatgtttgccactttgctccgaatatccaaggcctgttcatggcagtggcaaaacaacctcgataaacaaaaccagacaaaagcccaacaatgggtgacatgttactttcctaattacttgattctgctccttcctcccccaaccccagccccttagagcagccaggccacctttccttgagggagccatacaagatgtccttgcacggctccaagggaaccttcagtgcagaccatcttccccgcctcctttcttcctcttgataggtccacccacagcttccttgttgttgtttttggttgatctgtttgtttttgggtcccccggccacacacgccccccctccccagctccaggaagctgtacacatactggagcatttggagctgacttggcaggataatgtgactgctggcagcttctaaaatatgacaccagtgaaaatatgaaccaaatgtttcttgtatgctagggtgtgaagtcttcatcatgctttgctctgagagcagagagcacgaaagaactagacagttttgggtcttgatcctggctgtgtctcttaattgctgggtggtatctttgaacacaattctttattataaaatagcagttgtcttacttgcttcataaaggtgccattggggtcaaacaaagtcatttattgagtccatttacatggcagagagtgtggtgaagtagcacctctactgaaacctgagttccttaaaggcgggaccatttcttactcccactgggctggatgtgtcgagtctgacccactgggcttggatcttgatgctgtcccttgctagctctgtgactttgggcaagttactaacctttcatctggaaagcatcaatcacaacagcacctgcctcagagagttctcctagaaactaaatagggttttatgcatagcccaaggcttggaagtcgctctgtgaatgtcagcaatggttacttgtaagcccagtgcctggcacatgtctgtcttttgaaatatagtaaacagtaagtcggagaaggcaatggcaacccactccagtactcttacccagaaaatcccatggatggaggagcctggtaggctgcagtccatggggttgctaagagttggacacgactgagcgacttcactttcagttttcactttcatgcattggagaaggaaatggcaacccactccagtgtttttgcctggagaatcccagggatgggggagcgtggtgggctgccatctatgggatcgcacagagttggacatgactgaagtgacttagcagcagcagcagcagacagtaagtgctcaacaaatgctggttccattttccataatctatcttcagcaagtctttcctttgacatctggcagattaccatggtgtatctcactgggattgatcccaagacaggaagatagggggttttccagagggagtttaatggtgaaggttctcttcatacgcatttgttatttcagccattataaacctacaaagggagaaataatggaccaactaactcagtgtcttagagcatttgtcccttcatatagccatttgtttcagctg

SEQ ID NO: 64335 - DNA, 1361 bp, Bovine  19866881016506
  misc_feature (1)..(1): n is a, c, g, or t
nttcggtactgtgagagccgtgctggcaagactaaatgcaccaccaaaccagaaatgaaggttaggagttgagggtatgagatcaaagtagaatcttaaaccccaaattaggcccttgaccagacttctttaacacacacaatatcctccaacttgagaaagacagtatattttcaaatgacctgttcttctttctgtgtaattaaaatgacatagtagaatggggctgggcttggtgtcacagtggggtttgaagcctacttgtactctcattagccacgtgtgtaaattcaagcaggacagtttacctttccctgttttgtcatctcctttgtaaggacaaccttatctttttctcatgctggtggttgtgaggatttagatgtgatgttgctgtacggagcctgtgtatctacactgaaagtttaatttcctttctcttcctcactcagaacttccagggaaagggaataaggggttggctggagtaatgttaagaatgaaaacggaatatcttagcgaaaactatcactcatgagtggcattttttttttcagcagcgaggtgatgaagaataggcctggagagtcatagtcctgagtggccactgtaagcagctgagaccatgtcaggacagagggctatgggagggtgtgagaggttgaccctgtcgtccccggattgtcacacccagagaaattcaaggctgtagctgcagtcactttctctgtggcctaggctttctttgcctccagatgcttggccgtcttataaaaaggaaccccaagttatgattcagttgggcacagttctttaggaaaagtagctggactgtggaatctctgccaagggctgcagagtgcttcgggtgccctgatatggtggtggccttgtagatgataaatctcttaaggacaaagtttctgttttatctaccatataatccctcaagttgcagattcaggaccttgaatgtcagatgaaagaaagtgagccctttaatctcttttggaagctgggtaaagattccatcaccacttcctaacaggcctctctgacctccactctagaccccctccccacccagagcactctctccactatatcagcagtacttgtccagtgatggaggattcatcttgtccctccccgtacagtatccattaactacttactgtttctcaccagctaacgttctcttgtgcctcggtatcttttagaagctcttggtgtctcaggcagctttatttactaaatttgtgctcagttactttttcatgaaaagcaagatattaaaatgtttagattataataagtgaaagatgaagactgattttaaattttaaaaatatatgcgaaga

SEQ ID NO: 64336 - DNA, 1285 bp, Bovine  19866881049709
  misc_feature (1)..(1): n is a, c, g, or t
ntttctggagctctcttgcttttcgatgatccagcagatgttggcaatttgatctctggttcctctgccttttctaaacccagcttgaacatctggaatttcacggttaccaccatagatagtgcggtttttccagtagtctttaatctactttatcagcagggatattatctacagaccaccctttttccagaggatacggcttctgggtattttggcttttaggaagtaggggaatatgaggcaggggtcagctttcccaactggtgtgagcacaaggcctagtttcccattacactttgattctttgttcatcagtattaatccctaaagctcctggttcctgaaatcaacatttgcctctggagcagccaaagcttctggatttattactctgccttcaggttacaggcatatcctgttttattgcgctttgcttattgcacttctcagatagtatgggtttgttttttttttttaaacaaattgaaggtttttggcaaccctatgttgtcagatgatggttagcactttttttagcaataaagtattttttaattaaggtatgcacattattctttagacataatgctattgctcacttaacagactacaatatactataaacataacttttatatgcactggaaaaccaaacaattcatgtgactcactttattgcactggtctggaactgaaccagcaatatctcagagatacgcctgtattattaaattatttggtcactgaggatttctcttattttttgaagtatctgaaatgcatttaaaagtatgtttgttgtaatttatcctgcacctaggtgtcttattttaacatacctaattcactatactgccagaagaagcagatagatatgtaaaaaaagaaaacagaacatgtccttaaatgtcaaaggcatgattgatttccatgttatttttatgctgagatatctttaattcttttatgataataaaaaaggttttatctttaccattagcaccctgtgttacactaaaaatttacaacagaatgttgcttttatggcatctacttttacaagtgaaatccagaaattttatccaggtagagcagccaatcaagtttatgaatatttttcatgaaagtaatctaaaagaaaacattaggttttgggagtctctagattactttgtgtttttgtttggtttacaactcataaaatatatttactacacataaatcaaatacttacagaatatttcctacatagaaggaattcactcttggttcttcagaatat

SEQ ID NO: 64337 - DNA, 1473 bp, Bovine  19866881051796
  misc_feature (1)..(1): n is a, c, g, or t
ncttggcagaaggcctggatgtataatgagatattcacatgtgtcagaactctgtctcccaagaatccggtgttatcttggaacacttgagttctatttattgaaatgatgacatgccattatgggggcattgatgcacacaaagccaggtgcaaggctctgtgaggggctgatggtaggagtgtctgttggaacattaactccagattttctaacttgtgtgtgctgaaaatatcagatccagtgtggagttaagagcaagtgaaaaagaaaaaagagcactttaaaagaaaaaaatgtcatgtcagcaatactagagaatttctgtatttgtaatccttgagtatggtttcatttatttttctctcatttctctagaatacataaagatgtcatgcactgaagtgaagtgtaaggtgttagaccccgtccacagggaagattattcttgatacctgccgaaaacctccacgtgtgctcggtttggcagaatgaatcatgaacgtgcttgtgtgtcgtccttaaaacagtttccccttgcatctgatccttcttgggactgcgttgttacttctggaagagagtccagatgcaaaataattggcattattctgttgttgtttgttttatttttaatgaaggaacaagaagccaagtttgaccaggatgaattgcaatattctcaaggagtgagtcactcaaataatgtgaaagctttttctctgtagcaacttgtgtagttctttctgattgattctccttcctcccacttcttgggtaatgaagcctcaatgtcatgatgtgaaaggaacatgacaagcttggtatgccgctgacaagcagaacctcacaattaagctgattaagtcttaagtcggtcagttttctgactttgatgttaaggtctttaataggatataattttataagttgctttttttccaaaggcactggagggtctgatgagggaatcctcttggaaaactcaaggctgagcttggtaagactgccttactctcccctctgccggtttcctgaatggagcaggcactgctgctgggctcaggtgtcccagaatgcagttttatccacttgaaaacccttatctgttcagctcaattagattaattaccttgctcttcaggattcacaatgctctgcagtttagctgcagtaagtaaatgttacttttgcaagtaagatctactgttactggcctctgaagggctatggtttctttgaaactcataaagaggagaacagtcattctagccaagatggaatataggttagtaaatctgtcttccaactgagttttctactggctgtgaggcatctgtgttgaaaagagggatataactctttgtcattcctgtttggtgcctctgaaagtaatttgggatatttcatcataaaacatactattttctgtatctcctggagttaatggagtattctgtatgctcttggttt

SEQ ID NO: 64338 - DNA, 2585 bp, Bovine  19866881055846
  misc_feature (1)..(1): n is a, c, g, or t
nactggcttctttttctgcttcctcccctcctttctcagacttcatgagagggagatatagttggtatttgaatgccagttccatttcacttttaagtaatcagtgtatttcagtaagtctgctacctggagtctcaggtgccagataagaagcagtgctcacccaagagtttcaggtacttgaaaacggtgacattcatcagaggtgttagaactgatacattggagtacaaatgccaatatcacagttaaactgccagccagcatatatgttccttgatacagcagctgcttcctttgctcacttgtgcttccgtggtatgaaaacagtgagtttgtggtttgaaaacattgcagttctttaaatgctgccgaatgacagatggtggcaatattacgaagcaggtccgttttgctctggcgccatctatgtgtcatgatgcttgtagccacaagatgtcagtgtggtatcagtcctgggtgtctgcatgaaaactgcagccctaagcatttaagtccaaagaggaagacacagtccacgagcttggctcgccttgcccgtttccttgggctgcggtgttagtccacagactgcctttcctatgagttttcccggtacagttttccattggttcacacctcatcaggaggcttttcttagttctctctctaaatgtaaatactttcctacctcctacttatgcacgaataacctcagaaattccccccattttggtgtcatctcagcactttacagagtttgctaaaagatataagtaacagcatagttttctctctgtctcaggatggttttttttaagtagttaaggatggggggagaagtatctctagtcatggtactgttagggtttttttggttttttgtttgtttgtttttttttttttactttctcagcctctctttattttttggcaaaaacttaacctcgagaaaaaaaatcttgtgttaactgtgcaaaggacacaaaagagggaaagtagtgctcagggaagatcacagatatgtgggagccctgctgtgcttctgcagccttcacagagaaggaggtgtgtgatggccatttttctgatgaaggaagatgaaatatctttcccagggtcaattaactagtaaccaagtgctagaacctggatttgaacctgggtctatgagcttgtgccttcccaaagcctggtaacattactttgaaaaattttcattttattgagttactatactacataagtttcagttatacaacatagtgattcattatttttaaaaggcatactccattcatagttacggttggtaacattactcttgttcgactgtctgcatcataagaaaatgaggaggagcctgaagaacctgtgcccacattggtcagcaaatatctgttgggttctggctacgtggaaggtcccatgttgcgaataatatcaagacctattaaatacattctctgctctcaagaagcaaaacagagttaaggagagggatcaaaaaagacatgggcacgtaggtcagtagaaaaccatcagagaacggtggcatttcctgggagtgatggagggcaaagcagagggcagtgccatggtccagcccttccatgggctctttattatatcagccggaaataaatctgctaaatgaaaagagtattactgagggtggcctctaccttgactgtggttctaagatggaatttgagaaggggggctaatccaagcggccagaggttgccacccatgcatgcctttgcaacctagacgtggtaagattacacttaatcctctctttaggtggtctggtccaaggaagacaggtgaaagcaagacaggaggcatggtttggtgtggcagggctgtttccagtttcccagcccacggctcagatgtggagaacagacttgaagcttctggaaagatttggtaggggaaatagcagagtgcttctggcgtacaactttagaagtactgtgtccgtgtgaagaacttggcaaggaggaacagaggagccacagggatgactggacatttgaaaaataagacctgagaggagaggttagagaaacagaggttatgtaacctggagctcctcagcggtgactttggcagacttcttccagaacagggctcacagtatctcagcccagagagcagggactgaccctgtttgtccatacagagtgaagacagctccagctgagccacgaaaatttttgatttgatccatgaaaaagtctgccctctgcggctgctgtgaacacagaatatgtcatggaaggaagttgatagaattttattttttccctgttaaaagatacagtaaaaccttttattaattacggtgttggaaggcaggcttgacttgatattatggaatctgttgtattgacttctgttcttggtttgagagggacatgatcgacctggagaatatccggtttcatataacaatggatcatgtttgttataataatgggtctggagaggatgactacatcatttttctttgaatctgtaacactttggagagtgaaatagggtgctattaatagcatcctgaggcattaggcata

SEQ ID NO: 64339 - DNA, 770 bp, Bovine  19866881057735
  misc_feature (1)..(1): n is a, c, g, or t
ntgctgtgggcatagatattcaagcttttgtgtggacatgtgttcagatctcttggacgtgtactgaggagtggagttgctgggtcataaggtttatgtttaattttttgaggaactgcccagactgtgttccaaagtgactatagcatttgacagtcccaccagcaatgtatgagggctcctacttcttcacatcctcatcaacactggctattgttggtcttttttttacagtcattctaatagatatgaagtggaatctcactgtggttttgatttgcatttccctgatagctagtgatgttgaacatcttttcatgtgcttattgtccatttgtacatcatctttgtaaaactgtttattcagattctttgcccatttttaaattggttatttgtctttttatgatgatacgtttttagatcacggaactgtgtcttctgtgctttcactgtgtaaaacagaggtagcacataggcataaattacaagcagaattacttttcttcctgcttgaaacatacatctatgttcaacttggtgtgtctgttgtttataggaactgatggcttttgtccttgtcagtaaatattagcacatcaaaacaatggctgttaagcctggcagggtgacaaactacagctgtatttcactctttgttctcaaggtcaaagttggtgctgccctttcggcatttctctttcacaaactctgaagacaaattcaaggccaaaccaaggacaatactacatcagcaaattcactcacca

SEQ ID NO: 64340 - DNA, 1492 bp, Bovine  19866881063199
  misc_feature (1)..(1): n is a, c, g, or t
nctttttttaaaacttttatataagaatttgtatgtcttgggatattttcaaagatgaagcaatgctaatttacattaagatccaatttgaggaattattttgtgaaatttaggaatggaattgcatatagttatatctgtatgtaaatatggtaaccattattttaaatgaactttattctccagcttgaacagattaaattctatagtacactcatgccatttctttaattgcattaattatttattacatactaccatgcatacagttctgttggtctgggaaaagttgattatagcagtttgtttcaagtcagttttacaccctgggctgacaacattatcacactttctcactgaaatgaaagagctgggctagtgctccagggcagttctcacagatgcggggttaaggtgcaaactgtgtttgaagtatatccaccccgtttgtggtgggatctggtttatacaagaaacatgtatttgcttcatgcatcttcttggaagttcttcattttggcggattatagagtggaagtgaaaagtgaaatggaagatatgtttaatgcaaaacttgtcatagatttcagacggccatgttaaacctgtaggatcattagtttcttctttaacatttttcatcttctgattaaaaaaaagtaaaaatcagctcctttccattagtagtagttttgttccgtatttttaaaattagaaagactacttagatattaagcatgggttccctttggacgctgtgccgtgcgagcatctggactggccaccctctctctttctgagcccgggcactcaaatcgaaagcagcttcctctgcgaatttctgcgttttctggtcgcagatgtgcccttccatgttgcccgtttttgtaaaccaagcatatttttgtcatcgcctccgagccctttaatcagctctaagtgttgtcacgggatgaaaggtccatctgtgggtctgtatgtgggtggcaaacggtaagtgaaagggtcagcagaaatattggcagattaggagctgggttaaaaatacttttacgcaaaacagtaacacttgtatattaatatatttattggaaaatcaaagcctttccaaatggtcccatgagaaagaaaagaagtgaaagtttcacggtaaacgtttgtttgggaagcggattaaagacgttttagaggacagtcgaggcaggatttttcagaagaatctgagtttagcaattaaattgtaacaccttcttgttgtgattgatggaggtgtctcagctaaaggtgtattatattttcatgcaggtggataaaagctgcagagaaacatgctgtgatctaaactcttctctgaacattttggggggctttcctgtactgtataaaaccctgtgcactagctccgagctgcatctagcgtgcagccttttgtaccacatcacataacccacgacatttcagatgcttctctacatacgggaggcgggaaaac

SEQ ID NO: 64341 - DNA, 1166 bp, Bovine  19866881067804
  misc_feature (1)..(1): n is a, c, g, or t
ncttgagggcccattcttcactgttgtttgagatggaggaacacagtgctttgtgtgcctcgtgaccaaagaatttgaactggcagcaatcaagatttggggctaatcatcattaaagggtaatttcattgctgcccataattgatcttgtcttagacccattattgcagttcttttgtcacatgactaaaaaagaaaatgctcttggcaatgaacttttgaaagcaggtttcctacattcagttctttttcaactgactttataaatttccagtgtgcctttattagtgtagtgatttgcctgctttatattacatatttgaaataaaattgaaacagttcatcattgaagtgaatgttacaaaatcagcatctggtttgaataatgagttttttggtccacgttttgcttcattgaatgaggctaataaaactgcctttggttgttatgtgacttctccttcactttgggctcctttcagttcccagattggaggccactagggccttccaactttcagaaagttctttccttgttttaagggactctcagctactttttcatcaccaggaaggtagagttgatgatatacccccgccctgatcccaaaatcatggggttggggatatttcaggtatctttactattgaagctcttggagcaagggcaaagtgaaaaaagaggcctagagttggaaggatagaaaattagatgttggcatggcagcaacatactagccatactatttgggatcaggtgtctaggcacctgtccccagattttgtttctacctggaacttggatgcttgcagagagggaattgtacctgggtaatggtgatactccttggaggacacaaagccattcctgccacagctgctgataacacacatgtacagtcacacaacatgctcctgggaagtttcctgaaggtaaatacacttattttcttctttttaatttcttttgtttatcgaaggctaattgctttacagaattttgttgttttctgtcacacctcagcacgcatcagccataggtatacactactgatccacactgtaacacttacaaggcactttcaggttcagcatttgttctggctttggaaaaccacgtaaccattatccctcatgtactaatgaggaacctcttccaagaagta

SEQ ID NO: 64342 - DNA, 1733 bp, Bovine  19866881100200
  misc_feature (1)..(1): n is a, c, g, or t
ngtactttgttacagaagccctaggaagctaatacagatggtaaggggaaaaaaaccaaaaaacaaaaaaaaaacaacttgacatctctagaagagatctctaaaggacaggaggcatggttctcctgcatccatgggttgaccatggggctttcctcaaaagattatattgtgtctttttcctgccacccattaaaagaaaaaaaccatttgaccttccaaaagcacgttcctgagtaaaactggcaaaaactctgaatggacagtcaaggtttcctgatcttgcccaagagagcggatattttattactctttcatgaccacaaggtatttcctaagctcattaagcacatttttcctgagcaagatcttgtcttaataaggccaccgacaccccattcctccagcctccgtcatcaggcaggataaaaggctgaagtgcgggtggagatgagaggaggctctggagagttccaactctgcttgtttattttgagacacacttgtgctccaacgtgggccatcacaattgtggtcaaagcattaggaatccgaagaacacaaacaaagctaactgtggcgaagggccagggtaaaggaagggccaggggtgaggttttcttcaacattgtacaaggagggcaattttgcatagccttttatatgataatcacagccctttcgttggtattgaactttgcagcaagaaggaaaaataaataaataaggctgactaatggcttgtttccccagaggcggctttttatgggatcatatgttttttcagcttttcagtcacagtttcctgcttggatgttaggagcccttgacattggctatggcttagtgcactctggacagcagcccaagccacctcagagcagctggagaggggtccagctggaccacagcaccttcccaggtcacagcaatggcgaacccggtccccttcgatgagctgcactcagtgccaggtctttcagcaccttccaggtcaagcatgaccctccttagccagttgtagtgaggcaaacaagggttgggtggatggggagcctgtgacaaacagtctggagacattcaaaagcaagaacagcaactctgaactgcttttgttcctgttccattcatagctgctccttcccaggatcagaaaggacttttagaattggaccgtcttgaatttttaaatctttgctctgcccactgagtgactaagagcaagtaactaactttctgagcttcctttcttaccagtaaaattataagttataaaacctgtcttatgggcctcttattaggataagagataatgtttggaagacacctggcagattgtaggtgccaagcaagaagtagctagtgctgtgatcaagtgacctaaaccctgcccctgctccaccatcaaagcaacttccctggcagattaccgtattgaaagacaatgcaaagtgtgctggagccgaaaataccctggagttgggctcagtaaacaaataagcaaaaaccatagtctttcaggctccccttctgcaggttttcactttatttcactacttttgagtgggaggaaattactctggaatgccttctgtttggctccccttctgagaaggccatagagcaagggaatcaggatgggagaagggagatagatggtttgtgcctttatttttgccactttggattgggtggcggagggactgaagaggttgattaaaatgcaccaccct

SEQ ID NO: 64343 - DNA, 1219 bp, Bovine  19866881117204
  misc_feature (1)..(1): n is a, c, g, or t
natagcaattatgtttattattgaaaagtccctatgctgttttagaataatgtttgatcattatgagaaagtataaaactttaaggactactgaagaattccttagacaggtgccctctgacaaaaggaagtgagatttgatagaatttttcagaaaaaaatcatgtcaaaggatcacctcccagtgtcacctgtggggagggaggcaggtgtccctgcaaacttggcctctctgcagcgctcaattgccctgaccagcctacctcatggaaaccccctgttcctggcttcatttgtcttcagcccattcaggctgctccaacaaaacaccatgaacttggtgacttatgaacaacaggaatttgtttctcatgatgatgagaaagtccaagatgacgatgtcggcagatctggtgtctgatgagaacctgattgctggttcacagacggccctctctgtggggctccaccctcatgacctaatcacctcctaagtaatactcttctctttggggctgggatttcaacatatgaatttggggcaaaaataagcattgagactgtagcatcgtggctgtcccacccttgattgttccttttgctcttatgcaggctccctttctgtttacctctggaatgtccttgtcctcgacgaccttcctgtgtgctctcctcactccacagttctttcctcccttgaggtcttcattcatatctgtacagtaatggccctcgaatctccttctctggctccacctgcccatcagatgtttatacttggtgactccccaggttccagcatgttcaagatcggaagcatcactcactccttcctctgcacctggtcaccatcctctggtcctctcctgggtgaaaggtacctctgtccacccagccaaccactggagctcctccctgagcctcacccctcacagctccaatcacagaggagccccagcatccattctggcttccaggcacagcaactatgcctggaactttggctccggtccccccaaatctactccctgctccacaaggcagccagggccagcttctcaaatgctaacatgatcacctcttcgcagctcaaaaccctctaatgccttccttggccctgaagaaaatcaaaactccttaaactcagttcaaaggccccccagtcccgaccagtgcccaggcctccaacctctcccagcttcagtactcttctccccta

SEQ ID NO: 64344 - DNA, 2009 bp, Bovine  19866881120908
  misc_feature (1)..(1): n is a, c, g, or t
ncagacccaacccaagaagagcaagtaagcaaagcagaaatgtggtttcataccagagcatcttcttccagccaaatgtaatttacagcagagtgtttggctcatctgtcacaggagaattatacaccctcgccacttaccctgaaaataaatatgcactcctcattcaggtaaatgagatcgtttcagaaataaattgactccccccactaaaactcgctttctgcaaagaaaataaatgtttgagatgtttctcctgatgaagacgataccactgacataaatttaagaggctgattgtacggccctcgttcaaatgaaggccagcccaggagaagctagaggccatgagagccggaaacatcagataataactctgctaaatcaactctcagctcttatcagtatgcaaaaatctcccaggcagaaatggaggagaagaggtcaaaacatatgtctccactgacaatcatacatctggaaataaaaccaccttacaaaatgacactgattttctactagcccacacaaagctcctgaccacttcacaacagccttgtaaattaaagaaggtatgatttttccaatttagacattgggaaactgaggcagcgagcagttacccaagtgttcaaagactcacagccgatgacaggttgagttgggtgaaaaaagccagggggcccaggtgataattccagcattcattcaatccctctgctttcagagggagtacaacacacggtctctactcttaaggtgcatatgacttaattagaaaaataagacgattacacactaaatcaaacagtgcagttgaagaaaaatcaccaatgctaagcatataccctttgcaccctttccaactcaaaaccatactccttttctgaatttacggaattaacaaaaagattcttagtcaacacacagtttcaaacttaaagctgcacagtaagaaccagggccactggtcagaatatgtcatttgttaacttatttatgcccatatgattctcttgttcaatatttagttgatattgaacatcttgttcaagatcttgaatatcttgttcaaaactatgatagtcttaaatataattatttaccaatgaccagattaaaatgtctcacctttaagaaaaaagaatttaacatggtttaaaaaacaacagtctcaaatatgtagctcttaatatttttattagtgagttacaatgatctgtggagatactaatataaaactttgtaatttaaattttttaatttcataaaattttttggcattccctctccttggaacttaaacatttctaaatattttcaacagactttcaaattgctacattttaaagatttcatttagcatagggcaaaataaacataaagaagccccaaaacagcaaggcaacaaaagtcaccactaactaaatctgggtgttgaatttttggcatttgattgaaattccataaaaagaatgaagaattaatgatctaatagttgtcataattagcaattatattttcagaggctctaagaagaattaattagagcatacctttgaggtattattatctccattataaaacgaggagcggagatggagccgggatgaaccggttgcctctggccacaggcagaaaaagagagcgggctgacggatacctgaaattcctgagccccgaggcctccgcactaagcctgctcattctgagctggcatcaggaagttcattctctccatggcataaacaagaagctgtctttgctctctcatggactattcctctcgctagagctaccgacccccttcagtgctcccatgagaattcttttcagatttggtttccttggcgagctgccacctaaaagtgtagttgaataaagtgagataggtagaagtcctggatcttaaaaaaaaatttattacaggagaaggaaaagggaaacaggcagaaatatataaggaagattcatgtaactgaacatataacaagcagaagtaacattat

SEQ ID NO: 64345 - DNA, 1448 bp, Bovine  19866881139160
  misc_feature (1)..(1): n is a, c, g, or t
ntgatggcatttggggaaagagactgcatttattctgctctgtaaaagtccctgagttgaattgtatactatgctggtaaggtaactgaaaggttgtgttagagcaaatggtgtcccatttgctctaactgtccccagttgcccttcccccagttttaaaaggagagcaagcatcagaaggtctttggtttggtgcagtccagtcatgattttgtctgatgtcactgaatcaggaggacagcatcccctcagagatctcagctcttactcacagggtcccacttgtatgatcaatagaaaggattcttaggggcatggccagagacttattactactgtttgttattcatcaattaatatgatctgtgcctattatatgctaagcattgtgttcaatactttacttacactgttttatttagtaggtgtaattattatctctattctgatgaagaaactgaagttcagtgagactgaaaatttacccaagatcacatagcttttaagtggcagagccagcattcactctctgtcgtgggtgcttcctttccttgtacagtattaggagcataaggaaagatttgtaaagcttccccagcgagatcaccattccgccttcttcagatgaagctatctgtacagccaaaatatcactgaagttttgaatccaaagatcttccttccatcaccttctaccaatacaagatgctttttagttctgtccccaatattttactgagtgcctacagaatcctaattttaagaggtcactgatttcaagaaatacaataaaagcatagtttatgtcatctaacaacacaaaaattaaggtgcagttggtattacagtctaagtgaaattgcaagtgatgttattaatagtcttaatagttgtgtttaaagatactctcctcttacctatgatcaatgtaatatcatgccactgcttaaatgcagtcactcaatgattaataagttcagtagtctttgtatgactgtttttggaattacagtcctaaatctgttctggaacagaaagagagtatagacatttgtgggattacaatctggtaactttcaggcccagggcgaatttacacacactggcattcatccctgcatgatatttcccagttatccaaaaaggcttttattcaggaaccatttgtggtcaggatgcattgtgatgcatcatttatgcagtgccttaagtgtttactgagtagcgtgtgcaagagacaaagctccagaaccctgactaaagccctaactaactagagacacatttactgttatgtaataaaatttcatcggtgagtagatattgtttaactcattcatttcctgagagttgaagttcagggtttcctttcacatttagataaccccaacatgctgcttactattttcccttccaatagatagtcatgccaaagaatatgttttgca

SEQ ID NO: 64346 - DNA, 2428 bp, Bovine  19866881243358
  misc_feature (1)..(1): n is a, c, g, or t
ngatgagatggctggatggcatcctgacttgatggacgtgagtctgagtgaactccgggagttggtgatggacagggaggcctggcttgctgcgattcatggggtcgcaaagagtcggacacgactgagtgactgatctgatctgatctgatggctgattcactttgctatacagcagaaactaacacatggagaaggcaatggcaccccactccagtactcttgcctggaaaatcccatggacggaggagcctggtaggctgcagtccatgaggtcactaagagtcagacacgactgagcgacttcactttcacttttcactttcatgcattggagaaggaaatggcaacccactccagtgttcttgcctggagaatcccagggacgggggagcctggtgggaagccatctatggagtcgcatagagtcagacacgactgaagcggcttagcagcagcaggagcagcagaaactaacacaatattgtaaagcaactatactccgataaaaattttttttcaagacaaatgaaacttttggaggcagtacacatatttgttatcttgatcatggtgacaatttcataagtcaatgtgccaaatttatattatatcaaacttaccaaatgtaggcatgttttttttattttatgtcagttatacttgccaattaaaagagatctcaatgaagataaaaagaggtacaatttgaatctttcgtacataattattttagttttaacaaagaaatcaacaatatttgtgtttcaatcaatcacagcattcaatggcaaagggtttcacagaaactcagactaattcttttaatttacttcagtaggaaaaataaaaagctgaaaatacttctcaactggccttgttttgatgtcctgcttttccgtttgcgttaaatatgttgtgtctctccaatgatttctaaatgtaactccttgtcacactgcagctaataaacagaacatatgttcattcttatgttccggagataattattaaatgaacaattaatcttttgtttttgaggttaggagaggtaactactctaagagttcaggttctttttaaaatgaaattatctgttttctagtatgaagatcctaatgcttgttcatgcctggttatctgtagagtaaggatgaaaactctcattggaagcataatgctggaatacttggataggcagcgtaattttaaaccactaaatttgtggtaatctgttatagcagcaataggaaaccaatacagacaccgttcaaaagatgattgtaaagctgtcacactgtgggctttgaaagcaaatttgctgccttttcttcctctgttatgatatcatacgcttgtttccactagcagtaatgcacactggggttgccattgttaatcttgaaattgtactttgccagttaaagacatgagacctttggcctcttcttcattcctagggtgtccagtgggtggcctgtgatgtctccctgctaacgctagacgatatttcatcctatctaacaagcactctgctcagatggttgtctgtgcaagtgccacaaggaaagctcccatgggacccagaaaagtattcattttccaaagagaattaaaacccacattgatagcatataaaacaagaatgctttaaaatgtgaagagtgatgaggttatttcacccttaagttatatttctaggaaaaagcagaatttaaatcttaagagatctgtgtgcccaattgacacttcaaagaaagagaaatccagctaatgaaatgtaacctaacatccttccccagcttctgtattccccagattgctacccttttccaattaacttttccattcttctgctaattatctgatctagaagctttggagtgatatttttcctccctctgattcagcccttagaagacattctcatctcatcttcgttttctttggggaccctgtttctcagcattaatacgcatgcgcctaacacagctctgtatgcagcagctggctcacaggttggagcatgggattcgttctatccagtctgcatctctttctgcctgcacttccaacaccactcactccacactctacacagctccctgttgcttccacctgaagtgtaaatccttctacttagttttcaaggcctaactatccagctttgctccccatgcctctccacattccttccttctttcagacggccaggcaatttccatggattcataaaattcagtttcctcttttcttggtaactcagaagaaaggaacagaactgaatcagacgttgacccctttgacaaatatatagctttgtggggatgggggatggggagacaaatacaaaagctagttggggttttaggtactattgcaaatgagttctggagcacgccaagaggggctaaaagatcttcaggga

SEQ ID NO: 64347 - DNA, 1043 bp, Bovine  19866881301043
  misc_feature (1)..(1): n is a, c, g, or t
ntctttgtgaggggcccaggtaagtgattcttagctgcagactctcagcgccaactaacatgtggtccaattttctaaatgtgagtgttgtttttttgcctagaacagaagcttcatcttttagtcattttgttttaatccagcccagaaaccagatctgtttccctgcttgctttcagaagcatgaatgcagggcctcatggaggacaagactcactccctcagcagatgcaaagccgcctgccccaggtacacacccaccaacccatctggtgggttttgagttcggaatcactcatagctacaaatagattctttcagaggacagtgtccattcgccattgtgattccacttgagttagtactttgaaatcccagcttggctctactaccttctagacaggtatatagtgactataatcagctgagatcccaaccaaaccccaaatgggaaaactaccccatgagaaagtctccagctgggaaaagctgcccttgtctcgactcttaaagagaagagattcgtaattattttagtgagtagcctcccagacaaataattcaatcgggctaattttcagctacagtcaggcatcctgatgggaaagcaggccaaacaagccatctgcacaatccgagtctgggttgcctggggagcatcagggctccattgtgtttggggccattttcagcttcttttcttagtcattttttaagtgcctcttcccatcccaccccatccctgcttttgtgtgcgttcgtgtggtatatgtgctcgatcgctcagttatgtccaactctttgaggccccacggactgtagcccaccagcctcctctgcccatgggatttttcaggcaagaatattggagcaggttgccatttcctactccaggggatcttcctgacccagggaccaaacgcacatctcttgcttctcctgcactggcagggagattctttaccactactgccgcctgggaagccccatctctgcttataacttctagatgcagtccatgcatagagtctcctagaatcaaa

SEQ ID NO: 64348 - DNA, 1178 bp, Bovine  19866881331076
  misc_feature (1)..(1): n is a, c, g, or t
nctggaaacttttacccgggcatgagaactatctattgacttctaaaatgccgtagtgtaatgaagacgaatataaaggaattctgtaagcagaatgtgaaatgtgttgggtaaaataccatgtctaagcacaatggtacccactccagtgttcttgcctggagaatcccagggacgggggagcctggtgggctgccgtctatggggtcgcaccgagtcagaagttagactgaagcgacttagcagcagcagcagcaagcacaacggtattagtttatgatgaattgtattaaaatagacaaaacacagttgatgggagggtggggtacagaggggccttgagaggtatggttatgatctgtttttgagcgtaggtggtgggcatgagtgtatgctttatttacataaatattttcataaactctattcactagactttccatcccaattctcaaaaactgtagtcaacatttgctgtttagggaggaaataccatttcataagtggttttgaatttcattatatgaattcataaaatgctagattaaacagggagaaaagaacaaagcttgaatattactaacttaagagaagtgttgaaggaatgtaacttttgaagtttccaaagtgaaactatcgaaagaagtcccctttcccttttatgagtaataaaattatgacataaacagacctttctcagtgatcttccttgtactgtgcctgttccctcttactgaattttcttgggcagaattgttcagtcatttgataaatgtatgctaagatgtgcttggcagcatgctagtaacgattatagggacttaagtcctttcttttcagctagtagctggggagacaagacctttaagcagccaagaaagtgttaaaaagctagatacctgtttgagaatccagagtacaaaaaagaatcagagtcctcatgaagccatgtatgttcggtggcacaaacaataaatactgccaacctgcagattaaggaagtcctctctagttgacagtggtggggggactttgagagcaggtgtactttctgaggattgagaggaccttccaggcagtcctgtagctgaaagcactgtagtgaggacagaggcttggcccagggaactttcaagagctagaagataattctatcatgtaggaacagggcagctgtt

SEQ ID NO: 64349 - DNA, 1686 bp, Bovine  19866881360101
  misc_feature (1)..(1): n is a, c, g, or t
ntgtgcaaacctgaatcgatcattatggccaggagagggtaaagtttttgatttgaccaaccctacgcacattcggagaaggcaatggcaccccactccagtactcttgcctggaaaatcccatgggcggaggagcctggtaggctgcagtccatggggtctctaagagttggacacaactgagtgacttcccttttacttttcactttcatgcattggagaaggaaatggcaacccactccagtgttcttgcctggagaatcccagggacgggggagcctggtgggctgccatttatggggtcgcacaaagtcggacacgactgaagtgacttagcagcagtagcagcaatgaacattagtttccagaaacagaatggaatccgctcccctgaaccacacaactgaaaatgggagatgagaaatcatgggcagttgtcagatgagaagagaatagatagtgcacagataaataagcaaattctcattatacacagagaaagcatttccgccaaaactatacttattttttaatattttcctttccatttcttttaactgaatttaatttttgcaaaagcagttttcccttgaactgagctcaaatcaaatgctacatctagggtagttgaggaaatgtagcaataataactgaatcatttcaagttctgggatttctggaaatctatgctcttttggtgtttgggttttagctcaaataagacaagtttattcttcgttggggcatgaaataaggatttggagcccaatcagatcaagccaacagacgtgacttggacgccttatgttcaagatgccagagataaggcggtgcttgggcagccatgcctcctgctttgtccacctactccactattacttgtttcttgcctcctgacccccaggttttatacctgtgaaacattgtgcttttggggtgtgtatcatctgaatccccatttgcttagagaagctgctcaaaggcttgattttttttttttttaatggttttggattataatctgttgaccaaaactttcccctcagttgtcatgacaactttcatgttgcaagagctagatgttagcctagaggtttgacaagcagatgacttccagacagagaggctgatttagtacttttgggctgggacacagggcttttactgtacttgaaactagtttacataatttgtaaatcatttcagttcacaaaagttcacttctgaagtgaccatggagtatttggttatagcccaagttccttcaagggacccgatgtacacatttatattctttgagtttcaactagcagctgacaagttagcccatggatacgggggaagggaaagttacttgtcatattgaaattgttgttaataagttgggtgctactgaacttttgtctcctatcctatccttctatcctcaagttttgctggcttccaagaacaggaattgatcccactgctacccctctgccccgaagcctgacccttgtatgtgatagaatataattggaaaatcacaatttgctcagtgaaagtaaaatgctcctgttaaatttgggaacctttttttcccaaagactctgcttcatattctcactcaaatttgccttttaattattttacttcttcagtgagagtttgtatatttattctttaatgttgttatagtttgcgttg

SEQ ID NO: 64350 - DNA, 748 bp, Bovine  19866881469453
  misc_feature (1)..(1): n is a, c, g, or t
ncttatggcttaagttacttttggcgacctcttctgttacccacggcaaaaatcattcctaggaaagtggcatgcattaatccaatataagggattttcaattctctatttcattttgattgtgtatacactttttaaattcttcactcaagagaaagaagttttaagagtgtgctcattacactgatagattggaagacagaagtctacaatgcttccactcccttcaggataaaatgtgcacgggcagttcagtacctgtttggacagtctggagaaggcctggtcagctccttcagctgtggctccatttcttgctgcccactcttggcatggcattgcaatgaagtccctttggcctggactggatctgaagaaccacgagcaatagtagtgaggatcatgaagtttttgtttttttaaagcatcttgaagttttaataaagcttcatgtttggaaaaaaatattacttacaacatgcttttcctttaagcaatttatgttaatataaaagtatcctaaagaaaaattagatacagcagtgggggcatgttatatttttctcaaacagatacggcacttttattagaatcctaatgaaatgtatacccataaaaagtgcgtttcctgccctctacccccacaagttaaatatggccgacagtcatgtgtagagaatacccgagccaactccactgaataacgtgtcgtctgaggtctgccatcacctgacaggataaagctaat

SEQ ID NO: 64351 - DNA, 1167 bp, Bovine  19866881477145
  misc_feature (1)..(1): n is a, c, g, or t
nactctttgcgaccccatggactgcagcatgccaggcctccctgtcctcaccaactcctggagtttactccaagaaaaaagtttttccaagaaaaactgatagggcatgaaggactcaggatcagagatgtatgtttgggagcttcagtttattgacagtactggaagcactggggctaagatcattaagggaagacatggcctgcagcagggaatgaagggagcccaggaatgatggccagggccctcaaacatctaggggtaagcagaggagaaacaaccagccaagggcctgagaaggcaaggctactgagttaggaggaaaaccataggtctttggagtatgcaaatatttaggggggaatactagcacagatagttctgtggaaagtgatttccagatcctcaacttcttagtcactctctccaaaaagtcacctgcctgagaatgtgccaactgaaagtaaaatcttctccagccatttcctttcagtcacttgtctctctctcctttctctcccagatcttaaaacagagcagtacccagaaatgtaaaaatgtccagggcacagaaaagaaacaattagtaatactggtgtcagtgtgatgaagtcatgactgtaatatctagctcatcttgtgtgagccaagtgatgtccaatattttgctttcacagagttggagaacttaattggattgagaactgatggattattttaaaattttttgtgataaattactttgatttttggcatgtaagtcaggagttcaaagaattgcatacagttctaaaggaatattctatcaacttatttgtataaacaggtcttctcagagcataagtctttaaaagaataaacatagtaaagtaattgatgctgaattatgtttcattataacactaagttgtagtatctgtggaaatatgaactaattggaaaaaataagctctagtcaactcataagaatttatgtttataatacaattttcttttctaggttaatactttttcatcaaaacatgtaatatacaatgcttacattattttgatcaagtgtataaataaataattgtaaagataactgaatctaaaataaatgttttattttttagaactaatagtaataaaatttttaagttttttattatcaatttatatccataa

SEQ ID NO: 64352 - DNA, 799 bp, Bovine  19866881770311
  misc_feature (1)..(1): n is a, c, g, or t
ngccctgtatgtgttaaggtccacagccaacaatggaggaggggggcagccaacacaggctctaagtcattaacttgtcccctgacccacttacccctcaccttctcagtcattatccattttgcctccccacctaaggaccaatgatatgaactggtaattaacataagatgataatgaccctttgagacacatatgtttcctgccatcagatgctccctctgcagcttgacccaaccctagatacccagatgcagcaaggttgcctgagatgtgagcatggtattagcagcccccaaggaagtcagaggtcctatttagcatcacatgaaagtcaatggtgctaggtgattagactgttaaatttgaatcattttgtaatgaaaaatttagttttggaattttgaataatttggtctctgtgtaaaatcgagaaggttctttttccttgttgctcccttttccagttcatcagcattattttatgtttgtataatgatgccatgagatgactccatgctttggtagtgcccatgctagcttgtgggattcctctggccatgtttctgaatcaatccttcaggaaatattaagtgattatgaaattggaatctggggagaagcaaaaagtcttgacaataatctgaccagaagcatcatttccaaacaaagaggtctccagtccatgggaaggtgtcccagggtgttacttttctgtaacagactcccctaagagagctagtttgccagttttcctaggaaaagaatgtgggatggacccaggtggggaaaggagggg

SEQ ID NO: 64353 - DNA, 1406 bp, Bovine  19866881819224
  misc_feature (1)..(1): n is a, c, g, or t
nctcataatattcttgtgagagagacatattaatcattaatcctgcaaacaaggaaggaaacccagggttcagaaagtgaaggagggacaatgaggaagaagaaaaagaaagaaatgtcccaagttgttgccagttctattctatggactgagatccaaggataaacaagaaataaatcagaaaagatgaaaatatgtctcccctaccccatgtccaatgcacactccattccaaaattaatttactgagatatatgtaagaagccaagccagtccctggaacacaacatacacaaaaatggtagtgtcctctcttctctgtatgtgcattgctgcaacagacaaagatatttgggatctgttcccaactctgaaagttcaggaattatcacataactagagttaggaggaatgctaaaagccattcccctaagaatatccagtataataactgtgtctttcattttaatttaaaattcagtaagtatgtttccatttccccgcaaggagataaataactggaaatgactgaacatagcacaaaacagacaagggaaaaggatggcagttttaactttgaaattcaccattcttgtcagttaaagtcagacctaaagcattaatttattctgaaacattaattaactggagctttttttgcatttaattttctctggcattttagaatctattctaagccccgtggaaatggcaggtctgatgttattaaagttagcctttcagaaagtcctcgaactgaagactccaacatattaaaaaatgctgagagtccagataatgcaaatctaaattattattaaagggtattctttacacatgaaaaaaatctttgattttattaaaactgaattcaacttttagaaaggcttccattttatacaccagttgggctcttcagactcctatgaaacatctaaagcccatttcatttcactcactccactcattcatttaagtatctattgtgtgccaattacaagacaggcaggtaattctgagcagggcaaccaaagtcctgttcttgtgcagcttatagcttagaatagaaaatgacgaacaacaaacagataagaaaaatatccatgagtgatgagaacagtaaagaaaacaaaaggataatatgagcaagagtgattgggaagaactctctaaggaggagcgtccatgtcaagccttaaaggatgagaagcgggacacacaaagatctagagataaacagctcagagggattggaaggtgtcattgggaaaggctgaggctgagctcagcagttttgaaggcaggaaggtgacagtgactgagccgcaaggcagggggatggtgtcccctggcccgagacagaaacagctgggcgaggaaccagtagagtgtgtgttgtctgtggg

SEQ ID NO: 64354 - DNA, 1119 bp, Bovine  19866880478662
  misc_feature (1)..(1): n is a, c, g, or t
nactatttttgaaatacacacacctcacaaatcctagcatataattttatgaatttataaagatgggattatactgggacttccctgctgatccagtggctaagactctgcactctcaatgtatgcagcctaggtttgattcctcagggaactagatcccacatgctacaatgaagagttcacaagccacactaaagatcccacatgctgcaacaaaggcctagtgcagccaaataaataacttaaaaaaaaaaaaaagagattatactatatatgcatggttttacaacctaccttctaaatttgttgtatcttagccatagacacacatctacttaattttttaaaactacatatgatttcttcatatggctacagtatcttcttttctttctggctgcgacacatgcaatcttagtttcccccccagggactcagcccagcctcagcagtgaaagctcttgagtgctaaccactggattgccaggaaattcccagtatcatttattttagcaataccctactaatgaacatttgggtaggatccaaactttcacctttagaaacaaggctatagtgaataaccttgtactgtatctccagatccctcagtatatgtataatttcagtagattacatgtctagaagttgaattcctaggtcaaaaattacaaacatttaacattttaatagctattgtaaaattgtattataaaaagaagtttataaacaaatagcatatacacatatgactggagccacttatctgatcttataaaagtagttaaagtactacagaagacactcctgatggatgctcttaaagaagaatctgagatacttatgacttttgcatgtgcaaccctgccttttttgccaatcagttggaagccaagggagtgaattctgagtgaattctcgaaatccttgaagacccctacccagttctgtaaatacaggaggaagcacaaagatcatggcagaaggaggtaaattagaggtttgttaaaaggatcatccacgacagtttacagcttaaaaaaagattaagatggtatagccggatgctagggaaaaaaatgcagcctggctcctctgaaggaagaacttcgcatacaa

SEQ ID NO: 64355 - DNA, 693 bp, Bovine  19866881041689
  misc_feature (1)..(1): n is a, c, g, or t
ngcttttgtcttcacgtctgatgctggagcttgaagtccacagagcaggcaattggaaggggaaaatggttgtcatgtggaggagagcaagactaagctagaacttcaacatgagctggagcccacaaggacctctgaagtccatgttggttcttattgcctcaaatgttgatggtgtgggcattctgcagaagccagagctctttgcacagaaccaaatgcacacacctggcccaggagtcagagaagctcaaggaagagtaaggggaaggtgaagcagttacacacatggcttctgcctcttgctgatgaggtgaggcagcaggtaaccagcaacatgtgtcagctacaaaatggctgctgcttcacttcccaccctccaaatctactacaagaaactcctggtggcccatgctaactggaaacataccagaaagggaattctgggaaatgcaattcagcccagcaaagttaatacatttcaaagccattgtacttactgtatagcttaatggttatggactcaggccctagaatcagactttccaggtttgaatcacacgcagttcctttatttcaagctgtgtgttcacgagtaagttacttagtttttctatgcttagtttctttgactacaaaatgaagatacagtagtagtacttataaaatttgtgtgaagtttaaatgaggtag

SEQ ID NO: 64356 - DNA, 1630 bp, Bovine  19866881062859
  misc_feature (1)..(1): n is a, c, g, or t
ntctatacaaaatattttacttaggcctaggtgaccttttttaccataattttttttaatttactttattatggtaaaaacatctaacatgatatctacatacaacaaattttaaatgcttaatttattattgttgtctgtaggtagcgttgtacagcagatctctagagcttactcactcatcttgcttagctgaaactttatgccggttgatttgtaactcatttccccctcccccaccccggcaaccattgttccattcttcaattctatgaatttgacaattttaggtatctcatataagtggaatcatgcaatatttgtctgtgactggcttatttcactttacatggtaccctcaaggttcatccatattgttatatattgcagaatttccttctttgtaaagatgaatagtattccactggaaaaggcaatggcaccccactccagtactctcgcctggaaaatcccatggacagaggagcctggtgggctgcagtccatggggtcgctaagagtcggacactactgagtgacttcactttcactttccactttcatgcattgggagaaggaaatgggcaacccactccagtgttcttgcctagagaatctcagggacgggggagcctggtgggctgccgtctatggggtcgcacagagtcagacacgactgaagcgacttagcagcagcagtatatatgtgtgtgtgtgtgtatatatatgtgtgtgtatatatatatatatataggcttcccaggtggctcagttctggcctagagaatcccatggacagagaagcctggcaggctacagtccagaagggtgcaaagtcggacacgaccgaagcgactcagcatggacacacatgtatgtacacatgaactagtctaatatatatctaagtgacttgagataatgttgttcgccaagttctcattttgttaggggctagcactgtaccattctgcccagtggcccgggatgctcagagagctacctccaactgtacccttctgccttcttcaagtggtcatgacatttttagagccctgaagtctcttctggcgactgaagtccaattcttctgactcatcagggacccagctctgtcacatcacaaaggcaaccctctgaaaagtagtgttctgaagacagctttgccttcaggggtggggaagcaggaggtaaaagtggggtgaacagaattcaaatgccaacctctcccttgtccccaataacccatctggtccggagattagtggagatgctcactgtttaaaacaaacagccttcctggcttcacatgatcatctgtttatttgggtcatgtggggacagcagccaggggatgttaggcaaaagcaagggtttagaaaggaggcttttcctgggcttgttgctgcatgcaggagcctgaaaacggccagacagggtttctcatcaaccaaggttactctagttggggaatggacagtgggggtgagagataccatttaggtagtaagggggagggtaaaaggagaggaatgaatagggctgcttaatgttttagcccaacttcctgttgcaagagggtggaactcaggtagaagctggccattgttgtattccttcagggggaaag

SEQ ID NO: 64357 - DNA, 1960 bp, Bovine  19866881067655
  misc_feature (1)..(1): n is a, c, g, or t
ngagtcttctccaacactacaattcaaaagcatcaattcttctgcgctcagctttctttatagtccaactctcacatccatacatgactcctgaaaaaaccatagccttgactagacggacctttgttggcaaagtaacgtctctgctttttaatatgctgtctaggttggtcataactttccttccaaggagtaagcgtcttttaatttcatggctggaatcaccatctgcagtgagttggagcccaaaaaaataaagtcagccactgtttccccatctatttgccatgaagtgacagggccggatgccatgaccttagttttctgaatgttgagctttaagccaactttttcactctcttctttcattttcatcaagaggctctttagttcttccctttctgcctcaagggtggtgtcatatgcatatctgaggttattgatatttctcccggcaatcttgattccagcttgtgcttctttaagcccagcatctctcatgatgtactctgcatataagttaaataagcagggtgacaatatacagccttgacgtactcctttcctgatttggaaccagtctgttgttccatgtcaagttctaactattgcttcctgacctgcatacaggtttcttaagaggcatgtcaggtggtctggtattcccatctctttcagaattttccacagtttattgtgatccacacagtcaaaggctgaagtggagttggcccatcttttttaaacacttgactgattgcaaaggagtaaaataagatattcttgttagaattaaaaattaagtttttatagatttatttatttttttgctacataatttgtcttgttgaacctgcttttgtactgcttttcattaaggaaggaatacaaaggcagtgttagccttcttttttattttttaatgtgaaaattgattgaggcaattgctgtgctattgactgaagcaaaactgtgttcatggttgcttgcccgtggattaactctcttttatcagcctccacaattgacaaaattaatatatatctacctctgatgcctaggagtagacctcattaatatcccgttaaataggcttaacatattttaatgagactttttactgctagcatatatttatgcagcaaacttccactcccgctgttttatggaaacttgtctttaaaagatcataaatccccacctaatgtaaagtcaatcacttttgaagttatttatcctcctgattttgttccagcattttgttgctgcaaagttacttcttcatctaacacttttcctgcctctcaaaatagttacattgacaccagttcttaagttaaatgtaaatatgtccatatctactcaagagaaataataacccatctgtgtgaaggcttgtatgtggatgtttattagcggcattgttcatgacagccaaaaaatagaaacagtccaaatggccatcaagtggtaagtgggtaaacaaaatgccaatgtagttattcatccagtacgtaaactgcaatgtggtcgtccatacaatggagtattatttggccataaaaagaaatgaagtactgatacatgctacaccatggataaacctcacaaatattgtgcaaagtgaaagaatccaggtgtaaagaccacatgtttctgattcatttgtgtgaaatgttcacaaaaggcaaatctctggagacagttacattagtggttgcccagagctgagggcagaaatgaggaatgacttgcaaatgggtacagggtttttttgagggtgatgggattggattgtggtgatggttgcatgactccgtgaatacacaagaaacgattgtgtctttataggtaaatttatagtatgtaaattactactcaggaagcctgctaaaattagtcacatttaaaatttaatatttgtaatatttattgtatttaaatatgttacctgttttca

SEQ ID NO: 64358 - DNA, 880 bp, Bovine  19866881151857
  misc_feature (1)..(1): n is a, c, g, or t
nattatgtaagtccaaatccccggtaataaatatatacagacaatctctgctttgcatggcaaagcaggaccataaaatgactgtgaaagctgaaatcatgcatagcaatcttaatagtcagtgagaaaaagtatcattgttctgtgacctttaattagtttgattaaaacattaaaaactctactgtcagttataactctgtgtgttagttgctcagtcgtgtccaactctttgcaaccccatagactgtagcccatcaggctcttctgtccacaggattctcctggcaagaatactggagtgggtttccatgtctttctccaggggatcctcctgacccaaggatcaaaccctggtctcctgcactgcagacagattctttaccatctgagctagcagggaagcccattataactatttaggaaaatgaaaaaaatacaaggaaagttaacatttactcagtacactaatttaaaacactagaaacattgaaaattaagatgttttatttctttgtaaaagattatcagtgcttgccttctcatatagtttgtgatacaaagaggctcattttctatgacttggccaattgttatacccatttctaagtttggatcagcttcccacatgttatcctttgaatgttcgacatcatgaaataaccctgagacttcctttattgggaccacccagctaagctcctgccaaattaataacctacagaaactgtgtaagacaataaatgtttattgttctttaagctgttaagttttgggtaatttgtagagcagcatttgatgcttttgaactgcggtgctggagaagactcatgagagtcccttggacagcaagatcaaaccagttgatcctaaaggaaat

SEQ ID NO: 64359 - DNA, 1414 bp, Bovine  19866881306729
  misc_feature (1)..(1): n is a, c, g, or t
nctcagctcgtgcttgagctccgccagccgctgctgcgtggcaatcttctcccgcgccagccgctccatctcatgctcatattctttctctttcctcttcagggactggagaacagggcaagtaacagcagggcaccctgagcaggagccacagagcccatggtgccaccaacatctccttcacccaccctcacctgcgcatcgggggcccaggctgccagggagctgcgggaaaccacacctgcctctcggtccatggctccacctaaggaggcccagcatctggggacaggctgtgagctcacaagcaggtgcagattcaggccagtccctcccctacccctacatgattctgtcctgaggggctctgttgcctcttgccccatccaccctcctgggagtatctccttccattctgctgagaaggggagaaagggtaggagacttcttaggcagtgcccaaggcctgcaccgccattcacaccatcctgccgctatggatgcggataccacgagctaccctccatggaacccgttcctcaaggatccccagacgatcctgccctttgtcccttcattattcactcgtctccttaacttcaacgctcttgcaggacggccagcagattctgagacccctacctcacctccttgaccacctccatctcctcctgaacagctgctgacttgcgcacatcctccccacggtgcccacctgcaccgcctcgcacgccactctattcccacactccccaggccccgggatgtggccttccttcccctcctggacctgagcagcctcagccactgagaaacagctcttaggaggacagcacctcggcctccatctgagccgccctggagaagcccctccccgcttgacgctgaggccatcccgtcactcagaacactggagggcgctccttgtctgccatccgatctccccttccacgcctccagggccacgggccacctctcctctcggggctgaccctcccggggcacactcccccatgagaagggtctccggtttcccttcgtccgatgcttctaagcagctctggaaggccagctcctattctgttcctcaactcccttctgcaccgtctttccttgttttctgtgacctcctgtctgaaactttattaaactaacacatcttaaatcccacaggcctccccgtggccagcttttccttggcccaggcatgtcatgaccgcagggttcaacagacgatgtggacaatcctgacctcccgagcttctagtcgccgaggctttccagtcctggccaggtgtaggcccccatgtggtctccctccttaccccttcaggtctcgtccactggagctcctccacagcccagccccctctcacgtcctccgggtacaccagcctgctctcaggcttgctcg

SEQ ID NO: 64360 - DNA, 674 bp, Bovine  19866881339102
  misc_feature (1)..(1): n is a, c, g, or t
ntctgtggctcgcacggtcaggggtgcagccagcacgtcttgggcacgttatgtcagggtggcactggaatgtctgtttttcacacacacaaaaggtcaatcatcattggaggatgcagttctaccagctttttatttcttaaataagtggccaatttgattgagaaagtgacaaagcagcagtgaacctctaaaccaattaataaattcctctacttacaatccaaaccagtaacctcatcattgtacttatcccaggcaaggcacagggttagacagcagacagagaaaacacaggaaacaggaagaaagggcatcaacagggcagtgtcaaacaacagtgcaggaaacctctgcaaatctgcttccggattgtggatggatcactctccccctccctcattattcaaacagggctcgttacacttggatccagttgaggaccatccctgagatttcgacgttcgctgcttcggaagtggaggatgtctggtaactcaactaagcagcaggctgtggcgctctcccaacaaggatgacttggtttacagtgacagcttctcctcgtgtgtcggaagtcactgcaggctgcacagaaaacccagcgacagcggctttgtttcctcctaaatcggtaccattttttttcctttattgttcgtatctaggagtga

SEQ ID NO: 64361 - DNA, 1652 bp, Bovine  19866880865480
  misc_feature (1)..(1): n is a, c, g, or t
ntgccttctcctagttgtcagtcaccaatggagttttttaaaagacttgtaaaacactgaaggaaatgacttattaaagtctgatttttacttttgttcaaggaacagtggattcaaataaattattatgcttttgcttgtatatagccttgattctttgtcttgtagagtaaaaatcttacataaattcacattatagaattagatttttttgatcccttttccccactgggcatcatggagagctaccaaaaaaggactcttgctctcacatggctatttacttttcaggcttgaaatttttactttattgcattgtgaattctccttgtatattgctgtattaaaaaaaaaaaaaaaaaaacataaaccaaatggtagaatttaaaaacaccgttttataactcccaaatgaaacaactgattcagataccagttagcactaggcaagactgctagataaaagttaccagataaaactaccaagaattctgttgtagaaaccctgcttaggaaaggtggtcgcggcccagagagaagcaggtctgcagagcagcacggatagctgcagggcacagtgaggcctggggagtggggtcggaacagtcatccaagccttgtagatcttgaagatgaaagacaaatgtttatatccattgactttggctacagatactctgacctgccagtgccactctttaggatgtcattctggctaaataaaggcagaagcagtctaaatatacagcactggggaatttaaaatgacatcagtgacatgaagtccatgcagtgattcaccttccaactattaaaaaagaactatgacaaaattttccgacttcaagctatgtctcatggcctattattttatacaaaagaaagaaaagaagagcatttcctgcaaaccaaaactatgatgaagtattacctcacaaagatcagaatggccatcattaaaacatctataaataataaatgttggagaggatgtggagaaaaaggaacactcctacgctgttggtgggagtgaaaattgctgtagccattatgaagaacaatatggaggttccataaaaaactaaaaatagagctacaatatgacccagcataaccacacttgggcttatatctggaaaaatgctaattctgaaagatacatgcaccccagtgttcattgcagcaccgtatacaataggcaagacacagaagcacctgaatgtccatcagcagatgaatggatagagaagatggagtagttatatacaatggaatattagatgaccacgaaaaaagaatgaaataatgtcatttgcagcaacatggatgaacctagagattatcattctaagtgaagtaagccagagaaagacaaatatcattcgatattgcttatacatagaatcaaaaaaatgatataaatgaactaatttacaaaacataaatagacctacaggcatagaaaacaaacttatggttacctaaaaggaaagggaggggaggactaaattaagagtttgggagtaacatatatactctgctgctgctgctgctgctaagtcacttcagtcgggtctgactctgtgcgaccccatagacggcagcccaccaggttcccccgtccctgggattctccaggcaagaacactaga

SEQ ID NO: 64362 - DNA, 2142 bp, Bovine  19866881046365
  misc_feature (1)..(1): n is a, c, g, or t
nggtgagttgggacgagaaggggagccagactttagctaaggactaagaaagcagtatttataagaataccagcatcaaatataagaaacaggagttaatgaaacaaaaatgccacttgcaataataaaatgcatgttgatcttaaccaagcatatgctactatactttccacattcatccaagcctttattttttttaaattaacaagcttttatagtatgttttattttattgaataaaagcatccagtattccattttacgtctttacttttaaagcccattattgcattcaaaccaaaccatcttcccttgtgtgttctgtatttcttggtactgtctttactaacttgccacatgataagggcttccggctattcattattctttttcctaaaccacctttgcacacatgattttcaattagtatcaaaaagctaagactgaggtataatataaaggatagtgatatatgctttttaattctaagctatcctgatatcttctcttttgctgttttcttttctttctattacacttcctttacagtactgccagctttttgcttaaatggagggaaaaagtgatagtttgcccagctattcctcttctgtgccactgcacaaactaccatagggtaagtgcaaggaactttagcaaggaggaaacagatattgaaggaaagttgttattctttagtcgctaagccgtatccgactcttttgccaccccatggactgtagcccatcaggcttctctgtttatgggttttcccagacaagaatactggaatgcattgccatgccctcctccaggggatcttccctacccagggatcaaactcacatcttctgcattggcaggtggattctttagcactgagccaccggcaaggccatgaagggaagttaaacagttctaattctctcatcatcacctcttccagttgttttcagccgtgtagcatagtggaaattccatttgctagtctgccaatttttttaatgtgccctatttttctagatgccagcgagatctgttccagcctgtgatggtgtaccagggcaagatttgcacagcacaatttatgaagttattcaccacatccctgcccaacagcaagatcatccagagtaagtacgaacttgcttttgatgatgctacattgagagggctcaggattcagcccctgctgtccccagagtttactgaaaggttcagaagaaaaaatacattaaaaacagaaattatggctcccgtacatgtggacacactgtcccacctgaaaatagctctaagaaataaaacaggcaaacgtacaagtatcttctggggccaagtacttgggccagtggaccagacccagagctctagaatctaacatttccccaaatgaatccacttcgggagaagaaagaggtcgttaggccagttctcaagccatcttggttatcttgctgattttccagtggctgtagggtttttagaagaggaaatggcaacccactccagtattcctgcctggataatcccatggacagagaatagcaggctacatacagtccatgggggccgcagagagtcagacacgacttcagcgactaagcacacacgtagtggttttagaggcagtatcactacaaagggtgtgttcatgttcagtcgctcagccgtgtccgactctgcgactccgtggactgtagcccaccaggctcctctgtccatggaattttccaggcaagaatactggagtggggtaccatttcaccctccaggggatcttcctgacccagggatcgaacccatgtctcttgcatctcctacattgtcaggcagatcactacaaataggaccaggggtaaaaaaaaaaaaccctgcaaaatgtgcccaacactgtccccatcaaatgcccacctctcacagattcaaagcagtctactctcaagtgaacggaaccaccatgtgaaggactgggctcactccaagaaaagcccggaaactgctcatccagttaacctgggggctggcaccaggcagtcaccttcccttcccataggtggaaaaactaatgccaacagccttttggaataatgaaatgaacttcctttttttgagggctgtaactgccttcaggcataactg

SEQ ID NO: 64363 - DNA, 1660 bp, Bovine  19866881354583
  misc_feature (1)..(1): n is a, c, g, or t
naggagcctgccgtggtacagcccatggggcagcagaaagtcagacacgactgagtacgcacacatagacatatttggaagaatgattccttctagtgcactctctgagttcaggtaggggccagatttgacacccgagacgattattttttacttttaaagacagagcagaagattcctcaacttcacttgattgagaatggactgatgttgaagctgaaactccaatgctttggccacatgatgcgaagagctgactcatttgaaaagaccctggtgctgggaaagattgagggcaggaggagaaggggacaacagaggatgggatggttggatggcatcaccgactcaacggacatgagtttgggtgaactccgcgagttggtgatggacaaggaggcctggcgtgctgcagttcatggggtcgcaaagagtcagacacaattgagcgactgaactgaacgtgcttcccaggtggctcagtaggaaagaacccgcctgccaatgcgggagactctagagactctggttcaatccctgagtcacgaagatcctctgaaggaggaaatggcaacccactcccagtattcttgcctggagaatcccatggacagaggagccttgtggacttcagtctgcaggattgcaaagagttggacatgactgaagcaactgagcatgcacgcatatccctaatgtagaaactgaacagctgatcatcgaatactaacacacacgtttttagctttcaatcacccaacttgaagttaagagaggagcagtggcttggatgggggatgcccttctacactcctatttctatgattctgtttttagagcccatcactgtgaagtttaagaacatgaagaacaagaggtctgttcccaggctgtacctccacggcctgggaatcatatagaactcgaagctcagctctgtcacctaccagcttctgggcaatgtaattaaccttcctgagcctcagtttctttctttggaaatggttgtaatcatcctaccttgcaggcctgttgtaaggactgttttaagaatagatgaaacctgaagaattgattaaaaaccttgttcctagcaggtgctccatcatgatcgtatttaatccgacctcctaaaataacccagaaagctagtggagcccagtggagataagaacacctattgctttacttctaggtcaggcctctttacattacaaaaggctttttgtgagtcttttaacacaataactttgggtctattaagactttacctgactttgcaatgctgctgcctcctcccttgttgagatctactttgtagctcaggagagacttgtaggcacaaattccaggatgtgaagggttattccccacgtgaagattgtgggcagtttattccttcatcctcaactggaaagggtcacgctagaggaaatgggattacatttcaccaggaaggaattagattagaggggaagaagaacttcctgactgatgatttccttccctgcagtctttaaaaatagaatagttccccatttgtcagtgtttaagatgcaggaagttagaatagatagcttctcgagatctttttcaatgttagcattactgctgtcacagggctgtattgctaagaggaatgtacaaatacgaattgacg

SEQ ID NO: 64364 - DNA, 1063 bp, Bovine  19866881391151
  misc_feature (1)..(1): n is a, c, g, or t
nttattattgtaagtattatatacttaagtatatattgtaagtattatatacttcttattgtgtaacttcttagaggctttcaaggacaacttgacagggcctatcaaaccttgaatagactatctttgactcagaaatcccttttgtagaaacctgcccctactaataatcgtactaagtggataaatatgagtgggctatgatttcactatagcatggtttggaataggagcaaattggagacactttacatgtctacgggtaggggaatggttacataattaaggcacatctacattaacaaatattgtgcagctgttgaaagtataaaattacgtgtctctgagatagttgtgtgtgaaagaaacaggctacagaacaatatgatcccagttctgtaaaaataactccctcccttctctctcggtttctctccttcctttttttttttttttttgtaaatgcatagaaaacgccctgatggatacacatcaaactattatcagtggttaccacctggagagaggtgggtggagagacggcaagtgagaactttcatctttttaaagcgagaaaatgcagaaaggaaaacagtcaaggaagacaaaatgatattaggttagccattaaacaaagtcaagggctattgataatgttctaagccataccctttgagctgttttgcagatactgaaacccccaccaggtggaagaagttactaccacatgtaaaatagcgggaggcagggagctcagctaagtgctctgtgatgacctagggggtggaatgggggttgacgggtggaagggaggctccagaggaaggggatatttgtatgctgctgctgctgctaagttgcttcagtcgtgtccaactcttagcgaccccatggactgcagcccaccaggctgctccgtccatgggactctccaggcaagaacactggagtgggttgccattttccttctccaatgcatgaaaatggaaagtgaaagtgaagtcgctcagtcgtgtccgactcttagcgaccccatggactgcagcccaccaggctcctccat

SEQ ID NO: 64365 - DNA, 3114 bp, Bovine  19866880348299
  misc_feature (1)..(1): n is a, c, g, or t
ntttttctggaactctcttgcttttctgatgatccacagatgttgacaatttgatctctggttcctctgccttttctaaatccagcttgaacatctggaagttcacggttcatgtactgttgaagcctggcttggagaattttgagcattacttcactagcgtgtgagatgagtgcaattgtgtggtagtttgagcattctttgacattgcctttctttgggattggaatgaaaactgaccttttccagtcctgtggccactgctgagttttccaaatttgctggcatattgagttaaatttctttttcagagcactgcctagctaatataagtaaggtattgatcaacagaactctacaccactgacaccatagattgtttccttaggtttgaaagcacaaaaaaagaattgtactttaaatacaaaaaaagggggggggaaatgtcttttttctttgtttgagtcattttcaaattcatttattcagagtgcccttcagttaagagcttgatgtaacaatgagactgatgaaaggaacgaaagaagaaatctatgcattcaaatgagtattatcattcaagaatgttatctggcaattatacatttattcttcagtaactccattctcaattattttgggagcatttccattgggaactatcttttctgtggttctgtttggcaagaggtgcacaagttagaacatcactgatacatatgtatcacctgccatgataaagatgttggcttggaagggaattttcagttaagtctttaccttatggatgagaaaacagagattcagaaaatctgaatctcttgacagagacacttgacagagtcacagagctttcattcacttaaaagtcaatgagagaatgagaaaaagtatttgaatcaccacttcactgaattattcaacatatgtaactctttcttattggattccctcattcattcattctacaaatatttactgagtgcctagtatgtgcccatcactgctgaggatgttgcagtgaacaaaacagacaaagaactgcacatcttcatggagttcacactccaaggattcaataaaatttaaatccctgattcccttttccattgaaaggtcgctattttaacaattctaagaaaccacttgattagcatcaaagatgttgaacaaatgctctgttgacataatttgatgagtgtaggaattacaaatatgagtcaacttcactgattacaaagacagaagaaagtagtgtacaatcaacttttttagaaaagaattaaaccccatgaaaaaacaatgttccaacatgacatccagattcaccagccatgtctcctgaaacagaggagaagactgttaggaataagagaaaagaaaactaagcatttttaaaggctttctatatagggtaagaaaacatgaaacttttggcaagcatgaaacttttggcagctcgcagaatgaaaccactcgctgcctgcaagtgtttatcccacagctgttggaaatgaaggatgtcaaaatacacaaaagtaagactccaggcacagatatcaaagaagcaaaattccagggcatgcctggaatcaaagtggacaatagatgggactcacgaggagacacaggaacgagaggccttggaccatgaagaccagcggatcttgatatcacaaccagaatgcggccctgtgttcatctctcctgtaccatcacggaaaactatccagaccttcagaaatccattttaataggataccaggatacaagaagggcttcccaggtgccacagtgggaaagaacccacttgccaatgcaggagactcaagagacagggggttgatctctgggtcgggaagatcccctggagaaggaaatggcaacccattattcttgcctggaaaatcctacagacagagaagccaagcaggctacagtctaggggattgcaaagagtcgggcatgactaagcatgcgcacacgcacggaaggatacaaggccggtggctgttagttcattctgtacagggtgcacttatttactcagtggtgagatcatgaaaacttggtcagtacttccttttttctttccgtgttttcttctttttaaatgaaatatcatatttactgcaccaatagaaattgttattcttaaaagccaaacgatgatcttattttgggctttcctgatggctcagcaggtaaagaatccacctgtaatgcaggagacacaggtttgatccctgggttgggaagatcccttggaggaggaaattgcaatccactccagtattcttgcctgaaaaatcccatggacagaggagcttggtggactacagtccaaagggtcccaaagagtcggacacggctgagtaactaagcacaagcacagatccttttttttttttttttttctgggagacacacactgcctgctgtaccctgtccaccgcccccagccctcagccccaggtgctctgctactggaaaaggtcagagcagccatgtgggggacatagagaataccctgccctggccaactgactacaggtgcctgaccattctcggcacccagaaagctcccaagcctgggagcacctcagcaggcaccccgcccctcgtggttccatgggttaacatctaggatggtccctcggggaacaagggttatgctatgctatgctaagtcacttcagtcgtgtccgactctgtgcgaccccatagacagcagcccaccaggctcccccgtccctgggattcttcaggcaagaacactggagtgggttgccattgccttctccaatgcatgaaagtgaaaagtgaaagtgaagtcgctcagtcgtgtctgactcttatcgaccccatggactgcagcctactaggctcctccatccatgggattttccaggcaagagtactagagtggggtgccattgccttctccgacaggatcctattttataaagaaaaacatttgtgtttggagaaactaaaacatttgtattttgagaagtcaacgttctaaaagttcctacattcctctttggtttaagtgagaatatcacattcaagtcacaaagaagcggctcattcactaacagggtaaaaaga

SEQ ID NO: 64366 - DNA, 2886 bp, Bovine  19866880374663
  misc_feature (1)..(1): n is a, c, g, or t
nataagagtagcttgatttgattacttcaatttggttcttgctatagaattaaaggtaaagccaagcttttggaagttttacaggataataaccaaagcaggaatagtaaattaagacgaactctggtttcaacctgcacatctttattacttctaatgaacagggagatgtatacaggctcggagagtaaaacccattgataatctccttagcattctggataatttatcagtttctttcccacactgaggactctaagcccgtctaatattcgttaaggtttcttggcagcttctccataaaagaagcgattttctttctcataaaagcaatgtagttttgttcacttgcttcccaaaatgctgatcgacatttccagtagcacttggccattttgagtcacagaagcatttctttaaaaatgatgttatactcacagaagagtggacttcccaggtggcactagtggtaaagaacctgcctgccaatgcaggagacggaagagaagcaagttctatccctggattgggaagatcccctggaggagggcatggcaacccactgcagtattcttgcctggagaattccatggacagaggagcttggagggctatagtccacagggtcgcaaagagttggacacgactgaagcgacttagcatgcaggaatgcacaaaagatttgcaaaaatagtccagagggtcctgtatgcttcatactcagtttccctttagcatttgacataatcttagaacgattatcaaaatttaaaaaattaatctccgcatgatattattctctaaggtacagaacttatcatatcatctgtttttcacttacgtccttcttcagtcccaaggtctggttcagggtaccacgttacatttaatcatcgtgtcttcctagccttctccaatctatggtagttccatactctttccttgatttcgtgacctcaacccttttgaagagtaccagtcagtcattttatagaatgcccctattttagtctgggcggctctaacaaagtaccataaattgggtggtttacacaacagacctctatttctcacacagatctggaggctagaagttcttggtgaggacccacttctggttaaaagtcacccaccttcctcttatatcctcatatgttgagagggatatcatctctttcatagcccttcttagagggcaccaatctcatgagggcaccaccctcatgacctaatcacctcaaaggtcccacctccaaatgccatcacatggggggctagggcttcgatgtatcaccgtcagttcagttcagtcactcagttgtgtctgactctttgcaactctatggactgcagcacgccaggcctccctgtccatcaccaactcctggagtttgctcaaactcatgtccattgagtcagtgatgccatccaaccatctcatcctttgccgtccccttcttatacagccttcaatctttcccagcatcagggtcttttccagtgagtcagttcttcacatcaggtggacaaagtattggagttttagctttagcatcagtccttccaatgaatattcagggctgatttcctttaaggatggactggttggatgtccttgcagtccatgggactctcaagtgtcttctccaacaccacagttcaacagcatcaattcttcagtgctcagctttctttatagtccaactctcacatccatacatgacaactggaaaaaccatagctctgactagatggacctttgttggcaaagtaatgtctctgctttttaatatgctatgtaggttggtcataacttttcttccaaggagcaagcgtcttttaatttcatggctgcagttaccatctgcagtgattttggagccaagaaaaataaagtcagccactgtttccactgtttccccatctacatcaacatcagggagacacaaacattcaatccgtagcatgcctccatttgagtttgtatgatgtgctctcatgattagattggggttacgcataattgggagggaaactcacggtgactgatgtgtccttctcagcttgccgtgtccacccagatgacctggctaaggtgctatctgtcaggttcttcactgtaaacttacgacttcttcctttgtgattattaaatactttgagactatgtaaataacccatttctgcttaaacattcacagcagtgctttctgtcctccaaagcaataaactcagctaaatgtcaaaatgatgccagtgggaactttgggctctgtggagggcacaggagcctcatagctattcactcctcctggaaacccaacattccaggaaagggctaattgagttcatgacttcctccaccagttgtctggtaactggacactgtgatttggggttttctgagctaggagtggaaacttgcttcctattgtagcatgacttagttttctccccagagtcacagctgtgtttgatgtgacttaagaataaaatatgattaaataatacaaatgaacttatttacaaaacagaagcagactcacagacttagagaacgaacttctgcttggctgggaaaggatgggaggaagggataattagggagtttgggatagacatgtacacactgctgtatttaaaatggaaaaccaacaagtacctactgtatggcatagggaactctgctctatgttatgtggcagcctgcatgggaggtgagtttgggggagaatggatacatgtaaatgtatggttgagtccctttgctgttcacctgaaactatcataacattgttaactggatgaactataatataaaataaaaagaacttaagaaaataataacatacaatttccaggggagggaaagatgtagcctaagta

SEQ ID NO: 64367 - DNA, 1455 bp, Bovine  19866880576851
  misc_feature (1)..(1): n is a, c, g, or t
naaaataatagacacacatatatatgcatgacagaatcactttgctgtgcacttgaaacactgtaaatcaactatgcttcaatttttaaaaaagaatgtcccctctaaatgcccactgacagatgaatgggtaaaaagatgtggtgcacatatacaatggaatattggtggcggtggtttaatcactaagtcgtgaccgactcttgcgacagcatggactgtagcctgccaggctcctctgtccatgggatttctgacaaaaacactggagtgggttcccatttctctcttcaggggaatcttccagacccaggggttgaacctgtgtctcctgcattggcaggtggattctttactgccaagccacctgggacgccggggaagcgggtgagacccggcggggaaaactctggacccctttgcaggcccacagagaggactctggctgcatgaaagcacctgcctccttctgaaaaaggattaggtgcgacaaagtgcttgagccctcagctcttttgaaaagaaactcagtcttaagtgttaagctcggattctgggaaaccaggcccatggcctccgcagctgctcacagctcccgcgggtggatttgcactggcccttggggtgggggtgggggcagaccagatgttttaaggggattagtggctgaaagaaaagtccagtcttcctgtgtgtcacccactgttcaggggcaatttttccatctagtgccaccagaattggagggaatggaaagcaatagtttgcaactcctgattgcatccaataccccaagcaccaagtgtcctatctgattaaccctcatgaagaccacattacctctgttaacagctgaattgtgtcccccaaattcctgggttgaaatcctaaccctccaggacctcagaatgtgactgtatttggacatagggcctttaaagatgtaattaagctaagatgaggtcattagggtgggtccctaatccactgtggctggtgtccttgtagggaagggaattaggacaaggacgtacgcagaagtaagacgacaggacacgaggaacaggcaggcggctataagccaaggcgagaggcctcggaagaagccagccctgcagacaccttcatcttggacttctagctttcaggactgtggggcaatgaatttctgtggtttaagtcattcagtcggacagatgattctaatgcatagtgtagtttgagaatcagttcagtagagaaagtgctcacagggcacatctcctgatggagaacgattttcatatgtgaaacatcatttatgtgaagtcacttgacagccctgtccctcctccatgactggtatggtctggagtctgtgaagggacatcaggaactcaagagggcctctgctggccttcagagcctcctgccagagtcaggttcatctcatcacaggggcagagccaccacagg

SEQ ID NO: 64368 - DNA, 1149 bp, Bovine  19866880668221
  misc_feature (1)..(1): n is a, c, g, or t
nacactgaaggaaaggaaaccttccctttttcaagcagtgatttttgctgcttgaaatggggttgtactctccactttcaaacgaaaatgctgacattgttttccagaacaattgcaccatccagaccaagggacccacaaaagtgtcaattcactgcatgttagctttttctttttttttaatatatgaaactaatcataacaagtggttgctgtgaaaacagcaggctccctaaggctgcccttccaatgacccataccctgacctggacagaccaccttctttccaagagaggagaagttttgttcctagatcagatgaaactctggctttacccctggtgaccaggaggattaatcagacgccagtaaaacagccgacagacacactaaaccaacagacaataatgagcacacacaccaggaaacgtccgtccaagaggtccacttgatccttgtctttgccttaagatgtaatacctgctccgtggcttggctctccgtactccataaagggaacacttgtaagctgagaagctgccagtttttaggatcaatatggtactcacaagagctggttaggaaacaatgccagggacagaatttgcagtgggggcttgtgagggattaggctgtttcctcaagatttacgtcccagtgcacagccggtgctgaaacctgcacggcccaccctgtggctccagatgaggtgaatggaggtctctttgggttttggttttttcaaagtaaaatcttcccagtgtgcaaacaggaaccactaacactgaaccacatgcagatgcagagaaaaagtgaaagtcagcaaaaggaaaacaaatttctgacattttacttgggaggttcctgtaagagtctcggagaagctgtcaggcttgggatatctgcagcagtgtaagggtcagaacttaaatttcaaagccaatttcttcttcgccttcctgccttcttcactcagcaactgtttgggttctgttttcacttttcttctttcattctgttctctagggcaaagcagaaagcaaatgaaatctcatttgtgctgagaacttacatcaaattggttttatttccaagtgattcccctccaattttattttaaaacatgtttaaaagaaacttagattttat

SEQ ID NO: 64369 - DNA, 931 bp, Bovine  19866880882851
  misc_feature (1)..(1): n is a, c, g, or t
nggcctctaagtaaactcgactgccattcaaaagatttgctctgacacttaacaagtggtgcgggaagaaaggaaaatctgttgtcaggtttggggtgtttatcagcccccctcgagacacttgacctaatgctttgccccccctaatccgctgatctgcatgccacggctttgcgagcctcagcccccaactgccgggccaaattgcctgcaacgcttgtcccagcatccagccccctgggtacattgtgtgcggctcacctactccgcgcctcccctcccagcccccctctcgcgggtccccttaaatttaattctgctcacaaattgtgaaataagttgtttgggctggatttgtcgagtgaattgtcccactaatgaaacagtctgttcattatacagtcgtaggacggaagatttagcgctcccataccccgggacccgggcaggttaccgtttttagacggacagttgacaaaagaatgaatagctctctcctgtcaaatcaggcttacaaacagcttggcatacaaacagttactacttgtatgcatgcggatttagggtccccacctgctaatgccccagatttgtaagtacaaattggttagtcttcaaactgtttgcaaaaggaagaaaatgaccaaaaattagtttgttttagccttttcccctcccctcccctccctgctcctgcaagtgaaacattaaaaaagagagagagacagacagaagaaaaggataaaatagtatgtaatagtctcgtggaatattgttggctttttttacttaaggcatcgaatgaagctggatcattgtttggtaggaaatatttttgtgctgctcaggcatcctgcttctcagcaagcagctgaaaatctaatagaattaattgaagacctgtgatgttaaaagatggaggggaggagat

SEQ ID NO: 64370 - DNA, 1582 bp, Bovine  19866880487197
  misc_feature (1)..(1): n is a, c, g, or t
ntctctaggtcggaagattcccctggaggaggaaatggcaacctacttcagtattcttgcctggaaaattccatggacagagaagcctggcaggctacagtccatggggtcacaaagagttggacatgactaacactttcattaagacttagtttcctcaaacataaaatgagaataatatcaggagatggtggtgagattaaatggttcttgctttcagccttaaccaccctagcaacagataacatggctccatttttggactcatgcaaatttttagatcttgtatgatattggtcaagactttagaagcactaagaagtaaaaagcttatcgtttttcctgtatgtacttatttatgcaactccatgtgagatattcagtgttctttcttctccctgtatattaccatttcctttcccacatttgagccatttgtgcgggtccaggtagagcagagaggaagaagagggaagcagaagcaaccgaaaaaatcttttttaggagcctacgtcttaagagacttgagttaatttccagagaggctaaaaggggacactttggccagagccgtagggagagagcccagaaccaggaggagggtcccccggcctgaagaatggcagacgccccgggagacagcagaagcctggcagggcagcaaaggagatggtttggggataccctttggctgtgacagtgaccatgaggaggtaccaggaaaacatcagacttaaagaatggggacctgtggatggggcaagtgcctatgtcagaagtgatatgggaattgtttcatgaggaccaaaataccatcctcctactatgcattattgcactaagatctcagaaataagatgtaattcctcgaagaagtgatatttttcgccatgagcctgatggaaaaggggctccgaaatgagacacgtttataaaaaacaaagctctgtgtctcccccggccccttaggagtctgggcgctgaaagaagacccagcctgtggatctgatgcctggagccccgagggggacgggctgcgcatgctctctgcgcactggcagcttggcgcttagcctctgcgcatgctctctgagtcccgcccgccccttgcctctgcgcctctgcacctagtgctgccgtctccccaggccccctctgttctgtgattacttcccttccttggctttctctgcggggtggagcctcgttttatgacccctgtaaaacgctaggagctgttgacttcttcctctgggtttctgagatacctgcagcagctgggaagagagcagtgaggaaggaaagagcaggccaaccttcccaggttcccccagcccctcaccccagccctcagcagggagatgtggcctgatcccaagacttggcaaggcagccacacacatttgcagagtgacaaaaggagaggaggggcctaagaggaaaacagctttcacatgtgtaaatgcctggaaaagttttttggattcattattctactctgggtgattttcaagagcaacagagcttggggcctaagattccaggaggtgactcaagtggcccagcagatacgcagatgctt

SEQ ID NO: 64371 - DNA, 874 bp, Bovine  19866880842154
  misc_feature (1)..(1): n is a, c, g, or t
ngaaaacaatgattattggcaaataactctccccatgtttcttaacagtctagaaagatcataatgagtcactttctacatcgatgttcccaaattgcttagtgccatatccaggcacactgattaaagtatgggaaaatggaatggctgcatctagttcctgattcttaccaaaagcagcacatttcagacacgtgacatttcatttcatccttacagtctcaatttcagcaggtactaatgactgtttttaccatttatttcactttgacaatgtccttgtttcaaccttgatattacttaataaaaaagaaacctgtcagctgagctaaaaagctgattaaaaatgcacctaatttgcctgaactcgttaataaagaacacaggaaaaggcacttattatcttcagtttacacaaatactactcaggccaatatttaagacacaccaacatctcccaaagtgttgtctagatagaaagtcattaaaactccaactgtagaaagattttttcatccttaagaatgttttttattaagtagaagaatgaaaggaaatctttaaaagacaataataaatatgtcaagctgtaattcacacacttacttatcatcagcaaggcttgcaacgtgcagtccatcatgactaaatgatacagatcgtacccatctgtcatttgctcctccagcaaatattggagtgggtgggggaaacaggtgcctgaagtaaaagacatgttttagggcaagtgagagtcacctcaagaaacaaaactaccttgtacatcagtctttgaatagtttagagtggccttcatgaacacaattgagaagacggagcagatccactttaaataagtacttaaacctaatta

SEQ ID NO: 64372 - DNA, 1407 bp, Bovine  19866880878988
  misc_feature (1)..(1): n is a, c, g, or t
ncaagagtactggagtggggtgccattgccttctcctaggcaactgctaatctgcttcctgtcttcatgaatttgtctattctgaacatttcatataaatggaatcctgtaatatgcagttttatgatgtcttcaaggttcacctatattgcagcatgaatcactactttattggaggtggccctgcaacaaaagaagccaccacaatgagaagaccttgcaccgcaccaaagacccagagcagccaaaaattaccaaaactaaacaaaacaaaacaaaaacaaggggtactgatgagaagggagattgggaattatggtagcttcgtggaggagacgatgtttaagttgatcttgaagaataagtatgagcctgtcaggtcatagaagaagagctaatagtatgtgcaagatcatagaggcataacagagcagagtgacctcctcccatgcctttagagtgaatggctttgggaggtgaatccataaattcctgtaaaggaattccagcacacctttaggttcagagtggatgtgttgagcaaaaggacagggctagggaagagagttcacccccaaggcaggatggggctgtctaagagttcagccttattccttagttctgaaggcacgcacgggactggatccagcccacacacaaacctttagaaggagcatcattctacctcctgtcaaaaagccagggagagggactgtaactgaagagagggtggttatggcaccaaaaagggggttggtgagggtgggagggagggagggaactcagacgacacacggacacacggtatttgttccacactcctgtttgtccttccagcttgcctagtggctacagacttgtaatgagtaactaaatcagtgatgtcaaagcttaactcttggtgtaaaacaggtactcctcttcagtcctaagtgccaaaacacatcccattgcccctggacccttgaccctctgtaagcttccaggcggccaatcagatttttccagaagttccaggcgaaccgccagctggtcgtgaattgaacccctgcgcccatttccgaattcgacctgctggcctaggtgtgcattgcagtgtcagagtctggtgtgttggtcaagaagccttctgctgtaagtcactaagagctcaactcaaaatggcttaaacaataacaaaaagtatattcacagaagaaggattttggaggtcaggtggtgtcagaattggtgaacttaacagcaaaattgggtcatcaagggcctcagctcttgccactcatcctcaatgtactggcctctcccctgtcaatgtaataggtcagctccccttatggtcctgatagggctgctgcagctccatgcttcacactacagacatcatgactgctgctgctgctgctaagt

SEQ ID NO: 64373 - DNA, 2139 bp, Bovine  19866880051355
  misc_feature (1)..(1): n is a, c, g, or t
ngactctgatgctgagagggattgggggcaggaggagaaggggatgacagaggatgagatggctggatggcatcactgactcgatggacatgagtctgagtgaactccgggagttggtgatggacagggaggcctggcgtgctgcgattcatggggtcgcaaagagtcggacacgacttagcgacttaactgaactgaactgaactgaatgaggccatactatgtaagtcaaccagacctccagagagtaaggcaactgctagatcaagaaaaagacatctttaatgcttgagggttttatgttcttagtagactggatggctatagtctcacttgaaaaaatatgtgtgaacttctctgaaaaacaaaatgctttaccactatttttgtcttgataaactgtcgacccacctcccaccttcatccttaggcaacggctcctcttcaccattattattttagtgcagtgaccaatatgtgtgccatctgcaactttgtggatgagttgaggcacgaaaagaatagcagaccatttctcttcattgtgtagaagaaatatagctctggtcagcatttgatacatgattatttgtttctctccattctccctgcaaataagtagtcaagatagaaatgctaattttttggagatgatgtttatcaatattattttgaaaacatgaaatggcaccctcccacagtggaaagaaggcagtaagtagattgattcattgagatacttaaaatcctcttggtgtgggggtgttagttgcttaatcatgtccgactctttgcaaccccatagactgtagcccaccaggcccctccatccatggaattttccaggcaagagtagtggagtgggttgccatttccttctccacctcgtggtgtaactaagtacaaaatgtggaatccaaatgtaaagacaaagagaagatgttatattgcttttaggaatcagagtttcaacattccatgtgctgataatttttttaaataaatagattatttatctccagtaacaagagctaatcaaaagtaagatagtatagaagatcgcttcctcttagctcttgaggccctctagttctttaaattgtcatatagtgacataaaaggctaaaatgtctccaccaaaagctattagttaaacagcccttagcagacctgttgcctcccttggccctgaagcacagaaattaagttctgcaactgaagacaatttgcattaagagtaaacagaaataggagagagagtatgaaggaggtatatagtagaggacaaaaagtaagaatcatactcaattgatgttcccatccaataaagggaacagagtactgtatcaggtcctctgagagatatagaaatgcaaaggcatttggaaagaaagagaacaagggggcctagatctctgatagtgaaacagagaagagtctacaggttcttgcagagggactcacaagagaagaggagagtggaaaattctaagagaatgaggttaccagactgcaaagtatacccccaaagacattcataaacattcatatacacatgaatgtgggcttctctggtggctcagtggtaaagaaacacctgcaatgcaggaaatacaggagattcaggtttgatccctgggttgggaagatcccctggaggaggacatggcaagccattccagtattcttgctgggaatatcccatggacagagaatcctggcaggctacagtccatgcagttgcagagttggacacaattgaagtgactgagcatgcacacatgagcatgtaggtacctcctcaccactcacacacacacacacacacatatacatatacacaataacagattcctgggggaaaaagaatctgatggcaattttgaactccagctgctcacacttagcatagagttattttcagggtggccaaatcctgtaaccagtactgattcccacttggacatttggagatctggaaatcagtggtgacaagataatctatagcattgaccaggaaagggtatcctgtgactagggcaacaaatagaagaaagagcctgctttaaactctgaggtttctacatatctttgtggtgctctgtttgtgtctggaatgtgggagagtaggaagataaa

SEQ ID NO: 64374 - DNA, 2167 bp, Bovine  19866880103324
  misc_feature (1)..(1): n is a, c, g, or t
ngtcgtcccagtgcaccagccccaagcatccagtatcgtgcatcgaacctggactggcaactcgtttcatacatgatattttacatgtatcaatgccattctctcaaatcttcccaccctctccctctcccacagagtccataagactgttctatacatcagtgtctcttttgctgtctcgtacacaggttattgttaccatctttctaaattccatatatatgcgttagtatactgtattggtgtttttccttctggcttacttcactctgtataataggctccagtttcatccacctcattagaactgattcaaatgtattctttttaatggctgagtaatactccattgtgtatatgtaccatagctttcttatccattcatctgctgatggacatctacgttgcttccatgtcctggctattataaacagtgctgcgatgaacattggggtacacgtgtctctttcccttctggtttcctcagtgtgtatgcccagcagtgggattgctggatcataaggcagttctattttcagttttgagaggcaatagcctttacagctgcatctcagacatgcaaagggttctaatcatttactcttgtagaagactggcctatcctgagagatgtcttaggctcttatgaaggacccatatatctgttcatctttgagcgcacatttcacatttctgtttttctgtccagaacaatgctgtccttacttgcctgttgtgtcttaactgttttcattgccatgtaaatatttcatgatttggaatatcgccacttgcaatcatgtcatctttaagaaatttgagcatgctacaagtacacattatcttcagttgtgatgagttgattaattactggatactagttagccaaagatagaagtcatttttatgctattaatcatttttcccacaaactctatagtagttgtcaaaaaggaaaattatataaacattgtatccattaatatcatcttagtttttgaagaatgtctcatgattcttcaaggatgacatactataatttaagaacaatttagatctattaatgtctagcttttaaaaaggaagtagatgtagcgtgtgcaactcaaaaggaaatcattttgacattagtagggagatctatataagatttgagtatttttggatcagaagataatctacttagatatgtgccttgtattatataaataatctaaggcaggagagaagagtctgtgtaggctggaatctatgagctagaatagagccaggtttttagccttattacccttgggcttctgttatccttgggcttctcttgtggctcagctggtaaagaatccgcctgcaatgcagaagacctgggtttaatccctgggttgggagaccccctggagaagggaaaggctactcactccagtattctggcctggagaattgcatggactgtatagtccatgcgggtcacaaagagttggatatgatgaagtgactttcagtttgattacccttacgtcaatcttgtacagcttaatattgcatgatttagctatcttttgtgaagtaggaaaatgaattacatttattcaccagccactatgggatggccatcatgagtcacaaactaggtgaggcattgaggacataaatataaataagataaattcatacccttcaggagcacagatgacaaatgaaggtcgacagggttctaaacattgtaaaggcaaagggcagccctggaagccagtccagactccttctccaatcagatcagttgctcagtcatgtctgcctctttgcaaccccatgaattgcagcatgccaggcctccctgtccatcaccaactcctggagttcactgagactcacgcccattgagtcagttatgccatccagccatctcatcctctgtcatccccttctcctcctgcccccaatccctcccagcatcagagtcttttccaatgagtcaactcttcgcatgaggtggccaaagtactggagtttcagctttagcatcattccttccaaagaaatcccagggctgatcttcagaatggactggttggatctccttgcagtccaagggactctcaagagttttctccaacaccacagttcaaaagcatcaattcttcggcgctcagccttcttcacagtccaa

SEQ ID NO: 64375 - DNA, 4874 bp, Bovine  19866880476194
  misc_feature (1)..(1): n is a, c, g, or t
ntgatgggaccggatgcctgatctcagtttcctgaatgttgagctttaagccactttttcactctcctctttcactttcatcaagaggcttttgagttcctcttcactttctgccataagggtggtattatctgcctgtctgaagttgttgatatttctcccagcaatcttgatttcagcttgtgcttcttccacgctgagctggaagctgagctcagcgtttctcatgatgtactctgcataaaagttaaataagcagggtgacaatatccagacttgatatactccttttcctgtttggaaccaatctgttgttccaggtccagttctaactgttgcttcctgacctgcatacacgtttctcaggaggtaggtcaggtggtctggtattcccatctctttcagaattttccacagtttattgtgatccacacagtcaaaggcttttgcatagtcaataaagcagaaatagatgtttttctggaactctcttgctcttttgatgatccaacgaatgttggcaatttgacctctggttcctctgccttttctaaaaccagcttgaacatctggaagttcatggttcacaaactgctaaagcctggcttggagaattttgagcattactttactagcatgtgagatgagtgcaattgtgcggtagtttgagcattctttggcattgcctttctttgggattggaatgaaaactgaccttttccagtcctgtggccactgctgagtttatttttaggaaaaaaaaaaaatcattggacttccctagccaccctagtggctcagtggtaaagaagccatctctcaatgcaggagatgcaggttcagtccttgggttgggaagattccctggaggaggaaatcacaacccacggtattctttcttacttgggaaacctatggacagaggagcctggtgggctacagtctatggtgtcacaaagagtaggacatgactgagcaactaaacaacaacaacaaacactcagtaggtgtcaaggtgctcccagggctgttccacgactgctaaaacagtcacagactatcagagggctaaagggatacgttcatcactcctccaaaaatatccaaacacttgaatccaagagacttaagaataagctcagacacctctccatctattaactttcccatactttcaaaaatagaaaaggtatttaaatcaagtgcctaaagaagtcctagttagcctatattccttgaggtagaagatggtggtcaataatttgcaagcctgggttttactcttttagctccggatttgaaaagtcactaaggtaaagtaagttaagtgagtgtggtggacacagtttaagatgatggcccacagaagacccttatccttaaatgattccttccccctgtatgaagtgggacaccacctccatgatatgttctacaaagagattttgtagctatcatttagcttactcatcagctgacttggttatattaaaaggagattttttccaagtaggcataacctaatcatttgatttctttaagaacaaagcattgtctctgtcccttaacagaagagaaaggcagagagattcaagacaagaaaggaattcaacatgacggaggttccccattaatgagagggagggcttggggcaaggacctgagaatggcctctgggagctgagagtaaatgctggccaacatccagcaacttggacttcagtcctacagttgcaggaaactggattccttgaacatgaactgacttggaagcagatttttcctcagagcttccgatccatcccggcgtaccttggtttcagccttaggtgatcctgagcagagaactcagttaagaccacttagacttctagtttgaggaactatgagataataaacagacttgtttaaactgataaataaatggcgatttgttacacagcaggagaaaatggacgcagcaaaccaattcaagtggcagatgaagacaacaggaaaatcaaatttttctttccttccataagctattcagttgtctcaggaaaggtgcagctatgttgactaacatgaggcccaacatgccccaagccatcctttttgtgacatggacagtgtccactgctaactcatgaatgccattgtcttcaaaactttatatttcaactatcacaactgccatttggtgctgataccatcattatcttcattttctaaatgaggatattgagatttaggatcattaaacaacctgtcagagatcacagtgagaaatgggggctgggaggggacagaatttaaggatggaaaaccaggcagtctaacctggagtgtacataaccaactatctagaagacctctggagaactttgattaaagctgtcagaacttctcctgtctcagtccatgatggcttgacaatatcagatagacatggcacatgtctctgacctaaaagcagaaccataagtgaagaacattattggaccttatacaccagagtcagggactggattttacatattcttctctgtgtgtacacaagagggacagatgtatgtttagatgtttcgggatggggcaaacaccaggcaaaacagtgaaagtgtcattctgccacactatgtctatccacattaagtactttaacttaatgaatggacgtggccttgccattgtgaaagatacaccaaatactgaagctacactcaagcgtagaacaggtctcagcggttaaaaatagtctccagattttcagaaagttctccaaagtgtgtcaggataaatagtaagaaatgatcaggcccacaaatgagtctgccattcattttggcagtaccagaaaatgtacacccacaaacgggattgataggataagtaacttagaaatattagacagatttaaaaagaaggaaacagtaatgctgatgatgatattaaacatttgaacattgtttagacattgattcataaaaacccagacaatggttatgaatggatgcactcaaataaatactatttctttttttaaaaagtcacatattcacagagtcagctggttactatggaatcacatatgatgtcataaatttgacattctaaatgcaaacctaaactgagcaacagaaacaacaggaaatggagctggggagaagaaaacctacataacaacaaaagaatatcagtagttagagaaatgagtcaaacatctctgaaacagaaaaagaaggtcagtgaattgaatgtcctagaatcttgccaaaggactgaggaaacatagatgtcagcccatccttttctcgggggcaatgctttgcagcaatcaaatttcagaggatgaccacacatagaaacaaaaggagaggtaaagaatatggagagtggaggaaaaggagctgaaagcatgtggtgtaagtccatccaataatcagcattcattgagcagatgctcatacgcaagtggtaagaggtgaaacacagttgctatctttgaagaatgcacagcctagtaggaaagagaatacataaacaaagttcaatttggcgctcagtaaaagtgtgtacacaagacacaggcaacacggaggaatgtttaacactgggaacttctcccaggtcatgctgagcttagctctgaagaacactgaggggaaaaggaggttttaagaaaataagggtggtatacagacaaatacaagtcatttggcataaatagaacagagataagatgtagagtggagggtatacaagttacaggtagacaggatacagcatgagtctgtctctctaaccaagcgaatgaagaatgcacctgaaaataaagcatcagtagatttatattttataaatatcataaataaatcgagtagatagacctagaagttgagaggatttgaggccataaaatctggttaaaagctgtattttaagattacatgtccataatgatctaaaggcctagaacaaggcaatggtaaaagaaatggagaagagggactggattcaaatatcttttggagttagaagtggtgggattttatggtggtggtggtggtgtgtgtgtgtttgggggcacggtgacaaaaagattttaggattagttctaggaatgcacagctatgccattctcttcagacacagactcaatcactcaactcgagatttttcgtgagtgcaagacacagagcataaagagattaacagactgcccttgaaaacctcaacttatgctggaagttgagctccttaaacagataaataatattaatcttgactgcattatagttactgaattggcaggaagcaatagaaatactggtccaggaaaatagtatttcctgcaattgaaaatgaaaaaaaaaattgaatagatgtccatgaaataagttatcatcttgtgttttcctgcatggccttccctattagtttattgataagaaacctcttttcactcttgatgctatgaatagttagataatacggatagaatacatgcctattgattgatttctataggattaaggtctttgattttaaaaatctattattgatgaggctcagatctacagaaaattggtttatggaaaaaaaaaaaaaaaaaagagagagaagtttcaattctacatggcaaatgaaaaagttccataagaagcaaccttctgagtaatggggaaaaaaatgttctgtgtaagcaactccacacttaattctaagtgctactgacctccgggaaattatcccaaagcatttcccccgttatcatttttcaaatgataaatgcatcatgtttcgaaatctattgggctttcttggggctcagtcggtaaagaatccatctgaaatgcaggagaatgtcctgtaaagcaagagacccaggt

SEQ ID NO: 64376 - DNA, 1185 bp, Bovine  19866880494414
  misc_feature (1)..(1): n is a, c, g, or t
ngatgagggaaagccccttacattaagtaaggaatgaaaagacttcccttttgacagtctaaattttaggactttaatctggagggatgcagaaggatatgatcaaactgcagaactctaactgtatagatctcctaagttggggaccctttgaagcttgaaagcttttcatataggaaaaaagaactgtgaattctaaaatcataatagaggtcaaaggtgcttgttgggtctacctcctgttagtctccttttctgttattgtgagacttggtatatctgattcatggtggtgtttctggtatttgtataactgtaatttttgtcttaatgttctttgatttattcatgatgttctctccagtcttaatttgtatccctgatgctctctatttcttggcccagttgtaaggaaacaacttgaagttgctccatctgcatggtgccttttacctttagaaaaccagagtaaagcaatcctgacttacccctgggagtgaacagtgctgacctgtcttctgctgtagttccactcttgagctcacattggttgtctcactttggtttaaaaatctcaattagaaaagcagtctagcttaccagttaagaatagggccactgtgtcaatctcatcttcagatttttgtttgccactgaggaaccctgtaataccggacatatcacctaactttagtgctttcgtttgcttatagaattgttaagagtagatgatgataacatgaaaagcacaagtcaggcacctcataagcattcaagttgtcatcgtctttttttctctcagttgttgaaaactcatagaggcattttttagaattttagtagtttgtgggaatttttctttttttttaatttcattttaggcacgtttaaggcctgtgttcctaattctgccgttctctttttgccatttgaaggaagagccctagactggatgtgttgatcaataatgcttggggtcttccagtgcccttatatgaagactgaagatggatttgagatgcagtttggcgtgaaccatctgggacacttcctactcaccaaccttctccttggactcctcaaaagttcagctcccagcagaattgtggtcgtttcctctaaactttacaaatatggagacatcaactttgaagacttgaacagtgaacagagctataataaaag

SEQ ID NO: 64377 - DNA, 1708 bp, Bovine  19866880621702
  misc_feature (1)..(1): n is a, c, g, or t
nccccaaggaaactggaacagatcttaaacatctaggagtcatggagtgggaggcctttcactccccagaattatgccagttataggcaggggccagttgccatgccaagcaaaatggatactcttgatatcattgagctagtcagtaccaagttaatggaactgctttgaaacctgtgaactggacccctgaccacatccatggagggcttctacatgacagctccactcaagatacaccccaatgggcccatgcaacagtgttccagaatgctttcaatgactgaaaactaactagttgagtcttatgttaaatagctttaggggcttcccagatggtgcagtggtaaagaccccgcctgccaatgcaggggatgtaagagacttgggttcaatccctgggtcaggaggatcccctggagtaggaaatggcaacccactccaggattcttgccttggaaatcccaaggacagaggagcttggcgggttacagtccatggggtcacaaagagtcagacacaactgagcatgcatattcattaaacagttttgggtttctgttgagtttgttgtgtaattctctcagtaactccttgatgtgtatttgttattcctgtttaactgatcaagcaattgaggctaagagaaataaagaaaagggctaatggcctcagagtcagaaggtagttgagcaggaattagaaccccaagctgtccactgcaaaaccaatgtgatctcctccttatcttgtcattcaaaaggctctatcaccatgatccttggagttaaaccagcaattcttcccagttccaaatgaggagactccgagtccctccttgttctgaaaaatgctgagtgggacagtgcctgtgctcagcatatgaacaactccagtagatccagagccatctttccccaaagccctcaggatatcagtgcatgtggaacccttcacaggaacttgggcttcttatgggaatctgctgcaagagtagaaaaggaggaaggactaggggattagaatcagaaagaatgttgcccacattctcacttgcatgatagttagagttaaaggggataacagatgcacttctaagtgttactgagagaattatggccacggttatcaaatacctaaacgaaatttggtacacaggaagtgctcaatatatagaagctatttcctaccacagaggagaattcaggcaggttgctggatttattggatcattctctctacatctgcgagattccaagggagctgatgtaaccagggagatggcctagttagttctaggaaaacctacgatgaaacttaacttttctcttaaactttagcagagctaagaggattaattcttccaaagtttgaagaagagcaaaaagctgaattcaggttccagttgtcatgcagacaagtagaatctccttaccacacgtcctccagtacatatacgcacagaggtgtatggcactggcgaacgcactccctcaaggactcatgcacacacactgacatatacacacgaaaagcctctcccactttaagcctgagtgccctccttgatccctgcaccctgttcttaagcccctgggctgggccaaaggaaaagaaactgctgtttcaagcctgttgaagtctaactcatcaaaatagttcaggttaccccctgcagcactttacaaggcattttaagcattttttt

SEQ ID NO: 64378 - DNA, 1304 bp, Bovine  19866880714596
  misc_feature (1)..(1): n is a, c, g, or t
natttcctaaccgtaattgcctcccaaagtccccatctccaataccatcatgttgggagtttgggcttcaacataagacattttggataacataattcagtccatcgcagtttgtttgttcagcttcatctctggtccacagattttggctgccttagtcattctcagctcttttgtttcctcttcatctcagtgagaccactatgatccacttgagtttcctctcactgcattgtgtcctagtatccaactggacaatcacatgtgaatcacagcattgtacttcctgttgtgtattctctgaaaatagtcatttcatatatttttgtttttatagtttttatagtgcttacagcaagagttcacattcagttgtattaactgggcaggaattagaagccaaaactatggatttttgaacgtagggaatcaaactttccctggaaagaatggaaccagtgagtctgaggaatggtgtagtgtaaaatttgggtaaagtagaaattaaaaagaaagatgtaagaactcacagttttagagatgcagcagttattagaggtgacatggtgagagacgctaacttcctctccatatttcctttacagccacatggtaagaaagtggaaaaaataccagtcagctaagtggtactactgtacatacatatttacatattcatttactaagcaatatggacaaattcagaattataaggtttacctgtggctaggatgagatcctagggaacaatttaatcttgggagaagacataaaaatgagtagaatagaactttgggagtagaagtaagataccctagttaatacagttgatggtttttaacaggaatattctaggtacaaataccctactatatttataaacttttatatcctcacagtcatcagattacatcctattgagggaaataaatcagtctatccatctattcctctgtcaatgcctcataaaatagccagtttacatcttagacataagaaaacacaaaagtccgtggagtattttccttcccaaaatgttccagacaattacaagttatatgttttggaattgcctgccatattatcaaaggatcccagctacccaggcataagccagaaaggtgatattacttagtgagtcagacagaatggatttcaaatcctgctctgtatccgaatagctcagtgaccttgggcatgtcgctaactaggacaaagaaagattctgattcaagatatatggagggaaaatggacaggaatagtggccgactggctatatatagagaaagagtcaaaaatgat

SEQ ID NO: 64379 - DNA, 1352 bp, Bovine  19866880742138
  misc_feature (1)..(1): n is a, c, g, or t
ntttctacatatccattatatttgaacaatgtattgtcataatgtctaatcaatttagactctaggaactggttccaaggtttcacattgaattaatttacaaaatttgcactgactcaatttccccttccttctacattccattatcactggactaaagtaatcaaactactattttgtaatagtaatcctaattttttacaaacacagctaatataagtaaacagagaacatttgcaaacagatatcaggacactgttatttgtataaaatctagcccagaaaatattggattttctttggtataagatgaactacagaatttattattttaagaacccttccaatttgaaatagcacagcctacatttctaggatgccagatatcaattgccttgaattccataaaaatggatttttatccatttctctcatagttctatgattcaagaagttattaataagacacaaaaatgtactgttgcactttactgttcaagcacaagttagaaaacatttttaaaaaagcatttcacttaatggtgcttatcattctacaaaaccagctcatttagccacagtccttcctaaaaacaacggacactcttgcatatatatgcattttcctatctccgtcggagtgtcacagtagacctctttaaacagcaaacaggacttgtatctagcgttagctttatttaaacattgggagtattggtattactgacatcagtctcttccttgaagtccccattctccataactaactgtacaatgtattttctcagatttacttacccaaaggcaagggaaatataattggctttctggtgacagtaagcaactcttctcagtaaaagcccatgtattaaaatcgtatggactggttcactactaggcatcatgtggatgtttcaggagagtttcctaaatcagtcagtggtgcgagcaggctgtagtcaaaggacattttggctaaatatttgctcctaatattgctaaatattaggcatttcttgactttcactagaaatcaggcatgttttattacactggaaattcacccatggatggtatagctgtagtggtaactgaagtgattcccatcgtgttaatactgctagcactaggtgttaccgtttataaaatgatgactttcactaagcacttcacatgtgatatctcatttaatcctccgaaccactagaaaattataatcattacccccattttactgataaggaaacagagttttaaacttcagggccaaatacctaataagtaatagatctgcctcttaaatccaggtctggtgaattctacagtcgatttccccccagttctttactata

SEQ ID NO: 64380 - DNA, 897 bp, Bovine  19866881048008
  misc_feature (1)..(1): n is a, c, g, or t
ntgattatttataagaaaaaattatctcttccatttcttatttttgcacgtaaagatttaactattaactagatatttaagtgatttatttactttggtaacaggccagacaaaaatatttaaattctactcttggaagtaagaattatctaatcattcacaagctcttataataaaacatttatcatgagtcattaatccattaggacttattttccatcccatccttccactagcaccttgctttgaacatagtcaagtttggctgcaatttttccttttatcatatatcatagttacaggatgggatgcaccaaagctggattccaaaaaccctgcactctacttgaacttggcctacagaaactcaaccactgactctagggctgagacttatccagcctcaaggcctgagatcatgcttggatcatgggctaccaaaagtttagggttaggagacagcaggaaaaattaaaaagtctaggagcaacattatctcacagagatttaaaatttttaaattcacagggcaccattttggtagtcttaagggtagggctaagaaagcgctctttgcataaactcttctcacctgcaaccctgttcacaatcccatgtctactttacactcttctggtctggtgtgggtgtgttagtcactcagtcgtgcccgactctttgcgaccaattgactatagcccaccaggctcctctgtccatggaattctccaagcaagaatattggagtgggtagccattcccttctccaggagatcttcccaatcctgctatcaaactgattctcctgcactgcaggcagattccttaccctctgaaccaccagggaagcccttaatagaaagctacattttctcaaaaattactaatagagaacga

SEQ ID NO: 64381 - DNA, 1856 bp, Bovine  19866881073369
  misc_feature (1)..(1): n is a, c, g, or t
ngggcatgattttaatagagaaagtaatcttggaatttgcactaaaatgtatagcacttctagctctgatcccctatacagcttatacaaatatgatacaataacatcataaccaggcagaaacaaatgacacctctgctagttgtaagtagaaagtagttatggagcatagtggaatcattggatgaaaccacaaacctattctaaagactcacatttaaaaaatagacaaaatgctcactttggcagcacttgtgctaaaattggaacaatacagagacaattaacatggcctctgtgcaaggataacatgagaactctggaagcagcctatatgtttcacaataaaaaataatcatcagatgatcaaaaaaggcaggttttatgaatcaaaaacaaaaatagacaaaccctaagagggttagcctgatcttatgtctacctcacagaaataattctagtaaaccacaacatcacccatctttcaataaacatttgctgaggtcctttgtatgagaggctgaaaatactgaaatgaatggcataaccctgccttaaaggagccacaatctctcagggaagagtcttcggagcttgaattggacacctaagggatccgttccctccagacccccgatgcccaccttgcctggccctcctcacacacgtccgtgtttgtaacctgcaggcactgcagcatgtcaactgtagactccgtgagctgtatcctgacgaacaggacttatttgatattgtactgatgactaataaccatgcccaagtgggagtgcggcttataaacagcgtcaatcactacggtaagtaaaataaataccgtgtggaggaacagcttgctgctctggaagagagaagccatgttattttgctcgccgtggcctaactaatgcagcctctttgatactgacacccccttctgcgtgagaatgtttatttgcctatgtcagaacaagagaggccatgttcatttttaacttcagcccagagtcgggcccaaagctctggacttaacttgtcaagtgtgaatttcaaagtcttaatcccaggccctgcaatatatttctctgttttacgtttttcacttctgaacttgacttcaaggagccgtcagcctagggctttctctgtgtgatcagacttcttgctcaccacagatacatgttaaaggttttaaggtttttacctttcctttccactcttaacatctgactctccccggctgcttgccccatacatcaaattcatacccatgccagcaaaactgtctttattcctttacagggaaaatttgtttgacactagactcttcatgacatctccatcagtgtgttagagagtttcaagggaggtccccatttttcctcttatgaatttacctgacttatgtggagacctttagcctatttgctaagtgacatgtccagtcttacgggtatgtccaagaaaaaataagatttaaatttggtaaaacgattatcctttaattaaaaataaataaacttaatttaaaaatacttttattactaaatacaaaattactttctagacagtccgtgtcaattcatactttcatccatagtgtatgtaagtgcctattttacagacttctcaccagcatctagtgtttttttttaaaactttggttgattcagaaggcatttaaaggtctattaatttttagtctgataatgacctcatttaaaatttcaagtcaagagagacaatttcagaccttttgttcttcagttttagggaaatagtttaaaccctatcactactgactattacactgtattgttactaagaaaatatggaaatggtacttaaaaatagagcca

SEQ ID NO: 64382 - DNA, 1080 bp, Bovine  19866881206466
  misc_feature (1)..(1): n is a, c, g, or t
nttaatctgcgtttaatgggtggttggttgtaggactagtctgtccagagcattccaatccaggaaaatatgtctgggtgcacacacagtttgataaatagtttttaatgttatgagtcagaggaaaatgtgaagtctaacattatatgttccctttctttctttttctttttcttccagttttgttgagatataactgacatacagcaccatatatatttaaagtgtgaaacataatggacataatgatttgacttacatatatcatgcaatgattactaagtttagtgaatatccatcatcttacatggacacaaagcaataaaacaaatttcctcatgatgagaacactaagggtttactgtcttaacattttgcattattaattatgtttatcatgttgtgcgtgatatccctggtatttgtcttataactgaaagtttataccctcatctcttccttctagtgattaatatatgtttctttttatctctaagaaggaaatctagaatgggacagggtacagggtggaagcagatgttggtcaccagctatgactctccaaaactaaacctgagtggtccagcatgtgtagaagtaaaactacaagccgtcggttgaatattgcctgtcttccatgtctttgtgaaagcgttcaactccatttgtggatcaatggtgctatacttaagtctggcccaacttttgcatcttagagtcagtcattaaatataaaattttcatttgtcttttcataatacttttattatctggatcacttttcctaaacatctcattttcttttttaaaaaattagtttctgttgctgtgctggatcttcattgtatcatgcaggatcttcgatctttgttgcagcatgcagactcttcactgtggcatgtgggatctaattctctgaccaaggattgaacccacggcccctgtattgggagtcttagccactggaccaccaggggaagtctcctcaatgtggagactcttatcatgtttccctttcttctctcctccttctaccttcctctctgttctccctatgaaaaaatttcagagcaaataata

SEQ ID NO: 64383 - DNA, 2463 bp, Bovine  19866881241745
  misc_feature (1)..(1): n is a, c, g, or t
nctcaatattcttgcttggagaatcccatggacagaggattctggtgggctatggttcatagggtcacaaagagttggacacgactgaagtaactttgttgttgttgtttgttgaataagactggagtccagtctttcttctccactttgattttctatagttttattgtgttgactggggttgggagggaattcagggggcagggattagaaatgggaaagcatatatttctcatggcatcagattaagtaaatgtaaaattcagttgggtcatgcctgcagtcaaataccaatggactaaagtgcaaaaactaccaagatgttgtgcctgttcttttaggtcccccattatgtttatatgattcatagccaattgacaagggatgtgttttataaaccaaatgtagaaacttagacattctcagtaaatatgaccctctaagaaaaccccaggagacctccaaacagggcagtgtttacaaaagacaccatagatgcctagccctttatcttctggaaggaaggtgtataaggggcaactatttctgaacactcgagtacattcccttgacagcatatgctaagagatttccttaaacgtactgttattcttccagaccatttgaatattgtaatattcttatccagctgaataatgccacttaaggagaaaagagaggaggcctttgagctgaggctagatgcaccacagtcattttctaggccagccctttgtaagttggcaattgaagaaccatcaatctatatgtgcaaagttggtgaagaattcaatccattcagtgcttagatgcctcattaacatttctaggctttaccaaaataacttttaaaagtaatccatgtccagttttagaggaaaaaagtgataatgttcgtcaatgagccatgtccaactttttgtgaccccatggactgtagcccaccaggctcctctgtccatggaattctccaggcaagaatactggaatggattgccatgcccttttccagggggatctttccaatgcagggatcgaacccgtatctcctgcaaggcaggcaaattctttcctgctaagccctgggaatataaagggcacctcaaaacatttccaacatttttgctctttggtgttgggattaacactacaaattttagaggcataacattttcactaacgctagttcaggattcaggacaaactgcaagaacaagttccctagggaagtcctaaagatccatttttggaagagaatgtctgtgtttatatttccagtttataaaacatttaccaatcacttggcctcagatcatgtttacagaggagaaaaacacccagaaaacaaataaactgcttcttgcacagtgtggatcaacaaagcttagctctccccaacagaagggcacgagatttccttgcctgatagaaaccccccatcgaggggtttctgtggaacatcccattcttataaccaaaggtttagttcagattgcttccggtcagatttgctgacagctgactgaaatttgacctaaaatgttctcagtgagtaggtccacttactaatcaacaaaccccaggtagtctctctctagggcagcatcctggaccgtgcagacaatttcctgagtctgttctccagggggaggttcgggttaaatggagacttgaatcagcacttccgattttgatgcagtttctcaagtggagcatggcctcaggacaccagtttatctgtcttgtcactggagaatggcctttgaaaaccagtttatctgttttggtttgtaggtcctagggaacagatcactggaagatgcactaactggttcctttcagcctttgggtggtcacgaaaaaacatcacgaagcaaaatcaaggccatgaatattgcttttaaacctggtgagaaagagatccttggctaatgagaccaaaatgatgaatgtaagaaaggaagtttgaaggaagatctgtgagaaccacctgcagagggatctgagtcatacccaggaaaatatgaggatgcctgctccctgggtagttcctgggtctttaatgtcagacggagcagctctgaccttttcattaactagaattagctttctgagctcctaaaatgcagccagcagtaactctccaaataaatttcaaagagtcatgctttgtgaaaacctatcaccttcctgagtcattaggaaaatgttgtgtgtctactgtgccaaatgtagtgtttcatgagagcccacagttctgcagcatttgagaacaaatctcttctctagtcattgctgctgggcatgtagttaattttaagcaaacgctatttagaaccaaatcaagcacaagtgactcatatgaaatggggatccaagaaatattaatgaaatgaattcatcaattaaaataattttctgatgcaaaaagagcagtcatgtgtaagtgatgtagggtggtca

SEQ ID NO: 64384 - DNA, 3087 bp, Bovine  19866881285099
  misc_feature (1)..(1): n is a, c, g, or t
ntatactctgatgtagagggatggggagttgctccttgaataaccgattctggaggttttaagaaaaacgctgaccttctttagtcccttctctgcatgcacagaagtaaacccagcatgcctcagtctgacatggcccatcagtcataaaaaaaagtgacactgaaatcagcgatgggggcggtgcagcagcagtgtccctccaacccccacccctcctgttcttgggcctgtgctctgagctgcatacaaatccacagctccgctttcctttcttggccctgggccccttctttccggcactctgtttcaaaaacatcacaagccacgcaggtggtttttgttgcaccacagctcgtattcttgacagatcttacatctgcacattaatactccttgatgtctccagcctgaaactttcccagacacactggcctaagagcctcagaacccatgcatgagggggactaactacacaggaattccttactgggtctcagggctgggggccatcgtgtttttaaacaagagaagcttcatgatcacttagctctgaacttcaaggcacttaacgacattagaaacccaccttctctttagagtgatgagtactttagccagaaccctggggtaaatccaagttactataatcatgagttatcaccattgccacaattgcaatcgcacaattaatgtttttgaatgaatacatgaacaagagtaataatatttaactttttgttgagtccctcccatatttaaggcactagattatcgcacacagcctctattgctctaaactactacataaggtagatactaatttatatacctagataagaaaggtaactaactaagaaaataaatattaataaataatctggtcaaagcaacaaggttggatttatagcagaataatgatttaaacacagagcataggctcccaaacccaggctagctaattccatttaatcatcctgagtctacataaaaagcaggggatgcgagtgtgacaaagagactaaggaacctgaaaataaactgtccagaaattgatttctgtcctcgggtttgtctttgaagaagccactggcatgcctcactggtcaggagaatcatttattcccatttcactagcatgcagtgaaacagaatgagatgcgtggtttggactgagtgaaaaagaagtttcccagattcaacaagaaataaagattggaaaaaaaaaaaaaagattcatctcccaggaaaggctggaaagaagagaacagaatcatccctgaggatattgaatagatgagtagactaggactattaataaatcagaacttcagagctagcagccaatacaaagaaacagtgttagaagttgtctttgagtgtccatctcctcccttccttctgaaataacatgaactgtgagtaataccatagacattatctacaatgacttcaaaatgttgtttctttacatccgtaatttttttttttaattctgatgttcaccctgagaaatttggcagttataaaatttgtcaggagagaggaagggggtcaacacagggttcaagccatctggtggggactgaaatcaagctgaagaagagttagcaggggcagagggagccttgctgattgtttgctgaagaaaagtgacagagagcgtgagccacagggcttctcagaaggggaggttggagggctgcctgggtcccaagtgcatgactaacccatgacttatggaaagcctgacaggtctgaccttgcaatgatgaagaatcacactgcaactgaccacagttgggcttcatctcatgccccaggcttcgtctcaggcactgaggaggacctccatcattctcccagtatggtttgggtatgaaacatatctgtgggtgtcaactgcagggacaggtctgggaacattctcaaaacatacatcttaaatctcttccacttgattatctagcttttaattccatccactgagcgtgtaatgtagatggctgagaaaaagaaatcagagggagatttgactctgggaagtttaacattctaaagcacactatcaggaaactgaacttgatttctctgaaattaattgaaggtgccaaaggagagaaaggatcaagctaacatataccaactattagctaaattcaagacttctattaatttattttcacattttaacagattatattaataataatgttagtattaacagtattaatattaccattattaatgttagttgaatttcttgttggacattcagtgaaaagctgatatgctcaaagaagaaggtatgaactatacaggttggttgagacaacacatttaagattgctatttctgttgttgctgttcagtcgctaagttgtgtccagctcttttcgaccccatggactgcagcatcaggcttccctgtgcttcactatctcgcagtgtttgctcaaattcatgtccattgagtcggtgatgctctctaaccatttcatcctctgtcgcccccttcttttttgccttcagtctttcccagaatcagagccttttccaataacttggctcttctcatcaggtccccaaagtattggagcttcagcttcagcatcagttcttccaatgaatattcagcgttgatttcctttagaattggctggtttgatctccttgcagttcaagggactctccaagagttatctccagcaccacaattcaaaaccatcaattctttggcactcaggcttctttatggtccaattctcacatccatacacttaatactccccctattttattggaaggacttcccaggtggtgctaatggtaaagaaccctcctacaaatgcaggagaagcctgggacaagagttttaactcctgggtcgggaagatcccctggagaagaaaatggcaaccgactctagtattcttgcctgggaaatcccatggacagaggagactggtggactacagtacatagcatcacaaagagtcagacatgactgaagctacatagcatgcattttactggaagtttcaatctaattaaaaatagagaaatgaatttcactatgttatagta

SEQ ID NO: 64385 - DNA, 1001 bp, Bovine  19866881285269
  misc_feature (1)..(1): n is a, c, g, or t
naatgaggaaaggtctgcatttgttgtactttgcaatgtttggactgatctgaatgaaatttccaatggctaatttcatttctaatccttccatgagccagaaaactccacctgtgagggaacagtttttcactgcctttcttttgaaaagggcaaggaccccatttcctgtcaacaagagctgcagtaacaggtgggaattggtttcttctatgacagtggaggttgcttggggaggaggcccaggactcaggcttctgcaaaagttcttggcttggggttaaaccagaatgtacaaagcaagacccgcatgtctcctgatagatatctgagctgggggctctgaggcacaggacagtttactaagaaggtagaattatgtaatcctgtcactcaacagggcttctttccaggtcaaggtatcctgggactaaacagtacacatagcaacaaaacaaactgaacctgtacactctttgcattgttcagtggagcacactccctgtgtcgatcataaatcaacagaagtgcagtggagtggtgcctcatttatttaccatcgctggggaatggactatttattatagataaatattccaaataactgaagcccatgactttaaatgccaaaactttaaaaaatgttaactgtgtatgatgaaaatcctctaaacatttcctactgtcttaaagaatgtacttagaatatactttgaccttagaaatgtttggaaggaaaaaaaatggaagaaggaatggacagacacgccggtagatctgaggtcttaatgctaatgactaatcaggagcaatgaaggtttctagacttagtcttctttttattttgagaggtgttattggtggactgaagctgtagtttggatgttgctggggagaaactgaagccttatgtggagcaggcagcagcaggagaatgctgatgctgctgatatatatgtatatacatatataaccaaaatactatatagatacagtgtaca

SEQ ID NO: 64386 - DNA, 1087 bp, Bovine  19866881332638
  misc_feature (1)..(1): n is a, c, g, or t
nggggactgggagccagatttacaaattctcaagtggagctctcttttttcacctgcaagatatatgttaagctcaagccctgcagtctggggtcaaatggatgccaaaataataatacatatatgtggaacacatttcttttgctgtaaaaacaacattagagtgagaaggcccattagacagtttctattctagcttcctttttttctacatgtgaggaaactgagacaacagagctcaaaatagaggtcaagggtccttatccttgttcagtagctaagtcgtttcccactctttgtgaccccatggactgaagcacagcaggcttccctgtccttcactatctcccggagtttgctcaaactcatgtccattgagtcagtggttctatctaaccatctaagcatgtcaccttctcccgctcccttctccttggccttcaatcttttccagtgtcaggatctttttccaatgagttagctcttggcatcaggtggccaaggtactagaggttcagcttcagcatcagtccttccaataaatattgagggttgattttctttaagattgacaagtttgatctccttgctgtccaagggactctcaagagtcttctccaactccacaattcaaaagcatcaattctttggtgctcaaccttctttatgatccaactcccatatctctgtatgactactagaaagaccatagctttaactatatggacctttgttggcaaagtaatgtctctgctttttaatatgctgtctagcaagggtcttttaatttcatggctgcagtcactgtccgcagtgattttggaacacaagaaaacaaaatctgctgttgctgtcactgtttttccccttctatttgccatgaaggggtggggaccagatgccatgatcttagttttttgaatggtgactttgaagccagctttttccaatctcctctctcaccctcatcaagaggctctttagttctgcctatccttggccttatccttgccagttgctttttactttgacatttaaatgtctgtatcagttacatgttattatgcagcacactgcccccaaatca

SEQ ID NO: 64387 - DNA, 1167 bp, Bovine  19866881510909
  misc_feature (1)..(1): n is a, c, g, or t
natggagcccagatcaaagtaaatgaaagtggtgtctgtttaggagttttaatggtcagctgggaatttcctctctagttacttcctagtaaacagagatttcactgatgtgaaatgacaggaattgcagggtatggtctggcttaacagatttctccaagagaacctacatccccggcgcctgagaccaaaatacataattaatttttgcccatgcatgtgggaatcatgcagcttgtcataaaagaggctactggcatccttacactttgaggatatttgtttcactcgaaaaacagaggaagaagctattcctacaattgtgttgatcttctttcagaggagggaaaattgagccttagggtgagaaggagaaggttcagaagaatatcagatgggtctgagataattatgtttacatggttaagaggtgtcagagtggcattactcatgagactgatctgaacagaatgttgcaaatcactttcaagattttttttggacttccccatatttttggaggttggagtcaggattactggctttggtaattaatcctccccagcctgcattctttgctactgagcatagcagtgattcaggggcccaacctgctaaatcaagataatgtttgacctctgggagcagaagcattttcctcactgagccggagaaactaaacccaggagcacagttggtaaaatcaagagagctcatatttgaagaggaaacttagaatctccatttggggcattttgagtgtattttagaatataatataaaaaattataaattcaaaagacaaagttaattttgttctatgtatgagtatagggcccttaaagagctgtgatatcttcaagggaaccactgatttctacaaacgtttatcacagctgatctgtcatgactgtgtgtttgttggtgtgttttcctagtgttagtttcacaagagcatacattggtatcacaggtatgcatgaaagaacttggttgattttgtttcactggagctaagatgtttgaaatcattttatccaatagaccatgggtgtctttgtgttactttgcaattagctataatgcctttagacaacttctctgactcaagtgagattgtgggacaaaattatcggtatgtttttgtcaaaaaggaaaataggatca

SEQ ID NO: 64388 - DNA, 963 bp, Bovine  19866881608559
  misc_feature (1)..(1): n is a, c, g, or t
ngttatagataacaaaagtgacataacccatgtgcctaagaagcctctgtcaaaaggcatgagatgttttctctgggtatatcacatttcatttggcaagaatctctcctagagtgtctggaaaaagacacaggaaggtcctgaatgtactctttaataggagacccacagagagtagtttagtcaatggtatagcaaatagaaatatttagaaatgaaaaagatcacccaagcccagtcttttcaatgtcccttggaccattcccagccactggggggacccatgttgtcttaactatggaacttcagatgacaaatatgttcttccagtgacttgctcatccacgtagtatgttcattgaggaggggacccagtcaggaaagttacctgtgttaatattctgttttaatcctttcgcagctgggtggtgaaagcgaacttcatctctgtctgaatctcagttttcttatctgtaaaatggaagtaacaaccccttatatatggtcattgtgaactttaaaggaaaaaataaaagccacaagaaaaataatacctggttagtacccaataattattcacttttataattttaatcacatatcatcaaatcaaggataccaacaaaaaataacttaatcatcagatttaatgataacatttttgacatttgggggtatggtttaaatgtgctattttaattacttttaaaactaattaccattggcatacattagtcaatattgtacatgttgtatttgtctttaggttcagcattaatatttgagactaatactgaaaatatagaatctaaagtttttttttttttttttttaattgcaaatcaatttggccattagggattacagagaacatcatggtgacggtctatcttttttcagctcatgtttgttatcttgacatagcacctttaagactgacggtataatttgaggtttgtcagg

SEQ ID NO: 64389 - DNA, 1830 bp, Bovine  19866880119920
  misc_feature (1)..(1): n is a, c, g, or t
ngtcagatcagatcagtcgctcagtcatgtccaactctttgcgaccccatgaatcgcagcacgccagaccttccctgtccattaccaactcccggagttcactgagactcacgtccatcgagtcagtgatgccatccagccatctcatcctctgtcgtccttctcctcttgcccccaatccctcccagcatcagtgtcttttccagtgagtcaactcttcgcatgaggtggccaaagtactggagtttcagctttagcatcattccttccaaagaaatcccagggctgatctccttcagaatggactggttggatctccttgcggtccaagggactctcaaaagagtcttctccaacaccacagttcaaaagcatcaattcttcagcgctcagccttcttcacagtccaactctcacatccataggtgaccacaagaagaaccatagccttgactagacaaacctttgttggcaaagtaatgtctttgcttttgaatatgctatctaggttggttataactttccttccaaattcatacaatttctctgtagttagctttataaagcatgaatgcatgaaaccgttattggttatcctgctactcattaagttttttaaaagctttctagaaagctttgaaaaattatgttaagagtaatgaaccaaaataattttcacttttacaagttccaaatgatactctttcctgttacaaacatttgtagaaagcatagaatgttatctaaactggcaaaaaaattaaaaccttgaaagaattataggcatgtttcaaaatgttatcaaatgatgaatttattttactagagcgtttgagacagattgaatgtgtttgttttgccccaaaggtgtcttggaatataacacatcaggaagtcaatactgagccatatggtccttttgaggcacaacaggtgagtcagaactgtattaaactgttgaaagttttaattttcattactttaaatgggaattatgaacttagaactattttgaagcaagttattccatataaaacatcacagaataagccttgttatttagtcaccaagtcatgtctgattctctttgaccccatggctcctctgtccatggaatttcaggcaagcatactggaatgggttgccatttcctcctccagaggatcttctccactcagggattgaacctgcatctcccgcattggcaggcagattctttactgctgagccaccagggaagtagaataagctttagaacataacaaaaaaattattttatttttattgttcagatttggaaaaaaagaggcaacgttttttttttatcttaacagctttattgttttaacgggtataatgagcttgtatttataaataaaagcttattcacatgaataatacagaaattataaaaatcttaaacactttaaggatgattcaattagaaaatttattaatataagtactgtgtgatagatctttaagggaaaagtcattggatcaactccatagatgctgaaaaggtattgcataaaattcaagtttttttcttgacttaaaactcataatcaaatgagaatagctgaatacttctcagcatgcttttatctttcccttttaagccaaaccccatcatcctgcttaaatattgtatatcatcattaatatttattattatcctgcagatattggttgataaaagtagataagagaaaaaaataaaattttaaaggtggacgtgtaaaatatcattatttatagaggccaagactgtgtccctgtaaaatccaaaagatcaatcaaaacccaataccaaaatgtaagagaatt

SEQ ID NO: 64390 - DNA, 1478 bp, Bovine  19866880364942
  misc_feature (1)..(1): n is a, c, g, or t
ncaagaatactggagtgggttgccatgccctcatccaagggatcttcctgacctagggatcaaaccagcatctcttacgtctcctgcattggcaggcagattcttttccactattgtcatctgggaaactttaatctctccatttccaaaataaatatttgagatagatcattatctctatcaacacattctgctggccatatcaactcacatgcagaactgtacatccttgggcccagctagagccttggctttatctctagacaggctaaatgcgaggaggtaatgtaatctaagtgactagtctgtggtttcagggtggtattgaacaattcaaaacttcatgcaaagtagcgaaataacagtgactaccacagtagtaatgagaacatattaacatggaggttatcaaatgcttcctaagtactgtgctggtacttgacacagttttttcagtaatccctcacagcgagtcagatgcagtggtatccactcctttttacagatgtggaaacaggctacgagtggttatgtgacctggggcaccagccgtgaccgctggagccagtgtttctcgcacagcaggtgaattctcatagtcttgaccatcgcatatttgagctccctgagttaaggaaaaacaatttgcccaaaacttaaaaccctacacaagtgtcctgaattgaatagacaacgaatacagacatcctattacatgttcatccatggattgagtagtttaaatttggaacatactttactaataacttaccttctgtttatctgaaattcacatttatctagacattccgtgtttttagtatatgtattgccaaagtgagcatggacattctgtatttttctttgcaaaatctggcaaccctagttggaagaaaatgaaagtataacccttttggggagaaagtattagtatacatctgggcttccctggtggctcagaaggtaaagaatctgcctgcaatgcaggagacctgggttcgatccctgggttgggaagatcccctggagaagggaatggctacccactccagtattcttgcctggataattccatggacaaactagcctagtgggctacagtccatggggtcacaaagagtcagacacaactgagcgactacccctttccctttcaaacaattgattttagagtagagggggagcctggtaagtcatccattcatgttcctacctttgcctgagctggtactttccatgggatggaatttgggattttgagtagcatctttttcctgacctaggttgtgggtgtgaagtgtgctggggggtggggtggatggggaagggggacatcaaagaaaactttattctttctgagcctcctaagattatcaaaataagccatactctggaaaaactcatgccaacctagaataagggggcacatttttctaccaggtggctttaggtgagggagctggcagagctgaacagca

SEQ ID NO: 64391 - DNA, 1939 bp, Bovine  19866880434008
  misc_feature (1)..(1): n is a, c, g, or t
nctcattagtcataagcccttcccagatcagatcagatcagatcagtcgctcagtcatgtccgactctttgcgaccccatgaatcgcagcacaccaggcctccctgtccatcaccaagtcccggagttcattgagactcacgtccatcgagtcagtgatgccatccagccatctcatcctctgtcgtcctcttctcctcctgcccccaatccctcccagcatcagagtcttttccaatgagtcaactcttcacatgaggtggccaaagtactggagtttcagctttagtatcattccttccaaagaaatcccagggctgatctccttcaggatggacttccaggtccccccatttaattggaggaactgagggtgggatgtttcatttcaacatttctgtggttcagggccagtaatttcagtaggaaggtccactgtgaagtcctcaaactgccttgattacttctcggcgagtgagccttgcctctgatggcttatgacaaacctagcatctttactgattccaatgagtaaactagatttacttacctcaagtggcttgaaattctttctggtgatcagcaaaagtggaggcagctccccacgcccttgttggcgatgcagcgtcacactaaaatgttagttgctcggttgtgtccgactctttgtgaccccatggactgtagcctgccaggctcctgtgtccatgaaattccccaggtaagaatactagaataggttgtcattcccttcttcaggggattttcctgacccagggattgaacccaggtctcctgtggattctttactatctgagccaccagggaagccccaaaatgtcacatgtcaatgagttgacagttacagcacctgctgggagcgttgcactgagctgggggactgcccaggaagaactaatgggccttgtggagcctcgccatgggaagagcttggtagagcgcacgctcacttaagacggaaatgctcagcattttaaatgttcagttcagtcactcagtcgtgtccgactctgtgaccccatgaatcgcagcacaccaggcctccctgtccatcaccaactcccggagttcactcaaactcatgtccatcgagttggttatgccatccagccatctcatcctctgtcgtccccttctcctcctgtccccaatccctccacttacctggcagattggagcattctgtgtcttggtgtaatgaagcatcatgttggcatagcaaaaaggaaaccgccctcctgacaggaattcggtctcagcggaagcccatggtccggtgcggggcgtcgcctgggagtggacgtgtgtgtctgtatgggtgtgcagccttgtttctgatgggaagtcaagaccaaactgcccattttatcgcttaattccacctgatggtttcctgaaacgactgttggagagcaaatccttccctgtttgcaggatcttttattttttaacttgtggtttttctccccccaacttttgctttggaaacatggaaatgatttgtgcagaattattttgatgaagagtaaagaactgaaagggtggagtaaatcagtcaccagatcattactgcagccaaaacccactggagccaaaagctgctggctcatccggaactttgctctgggcctggtgggcataaactggaaccttggcaataaacttctggacactaggtcaccccatgccagggtctctggaatccagatttaatactacacatgcttccttgttctgaaaggagaaagcatgacattaaatgctaggaaaatctgttccatcctcaatgtggaaatattgatgctagacacagaatatggagaaggaggctgtgggcagtttatctgcctggctcctggccaaccagcatgcacctcattctctatggtggtgctttaacttttatatcgagaagatca

SEQ ID NO: 64392 - DNA, 2399 bp, Bovine  19866880434880
  misc_feature (1)..(1): n is a, c, g, or t
nagatacacattaggcaacaatgacccatgaaaattaagatcacagtgggtcctacttttgtgttaaaaaaggaatctgtgcatatgtgatattttatatagttgcaatattttagaaattttggcacagattttaagttgaaatcttactagatatatacaccattagaatacataagaaaacttcagagacctccctggtggtcccgcaggtaagacttcaccttgcaatgcagaaagcgcaggttctatccctggtcggggactaagatcccataccccttgtggccaagagacaaaaacatgaaacagaagcaatattacaacacattcaataaagacactaaaaaatggttgatgtcaaaaaaaaaaaactttaacctttaatcatataacttcgattttcttctctttaaaaatgaccataatataaaactgtaagcactagaggtaataaaacaccaagcaggggctcaataaatggtatgattattatcctaagtatatatacagcttaataaacagcaggaactggcaggacaaaaatgtcatgtcctagcacactaggttactgtcagaccaccacctgcaaaactctaaatccctcctgagccccaaacagaggagaggttcctgctctcctttactttttcctatctgctcttatttccatccaccttgagttctagtcaattatttccagtcttatttctctcttccttttcattcatcccaacacaatgtcttcaagacagtgttgtgagatggaggtccagtggccatgggtgtcttcagcaaaacacctcctggattgttcacgccacaggcaggaagcatacaatgggtgagtgagggcagaaaggactcaccccagatgccagcagaagcagcctataagcgggtgggggctgggaaggagttagagtcaggcacccatgagcctgagaggtgacagccccggggagaaggcatccattgagagcttacaccagagggtgtgtgtccagaaagatgacaggccgtctcaaggaaaacccacaaaggagacccaaggcatgatcatgccattttcagattcaacaaaaagataatgaagaggaggatgcaatgaggaggaatggaagggaaggaataaaatctgggacatgtggacagtggatttagcagaaagaaaggaattagcagaactagtcactgactggcaggaaggaggcaggaggaggggaaaggacccacaggctggagtgttcatctgagattttctttttttttcatccaggaaataaatacaaaccaccggtttgggacacgttactgagtttgaagtgccttcagaatactcagggtgagacgtccaggagaactcagtgatagaaatgagctgatttgggcagcaagaagctgtggggctggactagatgacctagggagagacctgagcgctgctgcccagtaacataccacaagccagagacacagcttaaacacaggtagcgctttttttttggctgtatcatgcagcatgtacgatcttagttcccgaactagggacctaagtgcccctacagtggaagcatggagtcttaaccactgaaccaccagggaagtccccaaatatagatatataaatagatatacagatatatgtatgtatgtatttggatatatatgtatttggctgcacagaatcttagttccctaaccagggatccaacctgggccccagcagtaaaagcactgggtccaaaccactggactaccagtgtccctactaatatatttttatctaacccaaaataggacttccctgatagctcagttgataaagaatctgcctgcaatgcaggagacctgggttcgatctctgggttggggaagattccctggagaaggaaatggcaacccacttcagtattcttgcctggagaattccagggacagaggagcccggtgggctacagcccatggggtcacaaagagtcagaccagactgagcaacttgacactttcactttcaacccgaaatatccaaaaagaaagcaaatcaggcaagccaagaaagagcactcatgtaaaataacaaattcagttttgataatggttgacaaatgacaaacacggtactcacagtttccgaagaggatgccggtgtctgtaaattctcaccttgcacccaaatgctctctgtcacaaaggcgatgtgctctgcttcaagtataaaaggagataccaggaacagggcccatttgtttaagtcatcaatggactggatggagggaaagaaacacaattcaatagaggattcagtagacttcaaaaacaactgtcccttatattaacatctaggacgtcctcgcctttgtaattccaggtggcatatacattaaggccatccgatg

SEQ ID NO: 64393 - DNA, 3338 bp, Bovine  19866880495917
  misc_feature (1)..(1): n is a, c, g, or t
ngtcttatgactaaatgaggagtcacactgagctaagcttttcctgcactgaccccactctgtataccatggtccttaatgtgcattagagtctcctggccagaatttaaaagaagtacttatattttctacttattaaatgctgcaatattagatcgcatttctaggaaaatattggcttgcccaatataaaatatctaccaaccccaccaggctttagtatggggaccattggccttcgcaggtggcgcaatggtaaagaatccgcctgctgacgcaagagactttagagacacgggttgggaagatcccctggaacaggaaatggcagcccactccagtattctcgcctggaaaattccagggacagaggagcctggtgggctatagtccatggggtcgcaaagagtcagacgcgactgggccactgggcactaacatcacaagcacaaatgtgatcattaaaataaataccgatcttggctataagaaatgagtcaactaaaagcaacccaatcctgatgttcaataataccacctcagatttgaacaatacttgacactttgcaaactgtttctatattagatcttcctaatagcttgcccgggtaggtggggctacaatcacctccattttgcagtggaacaacttgcagtgaggagagacatagacaggcctcaaagccagtgagaaattctaactttggccacatggttctgtacaatggccatcggcaggcctcagccatgccggaaatggggcaacaagagattgcttttaataccaaagaaagtcagtgtgatggccacttggggaaatatgaagttgggaaagataaaaagatgcctccaaattttaaaggaaaaaaaaaatccaatctcgatgaaccttcacgactccatcatcaataaaagcaacactcggggatcccccggacctgtgtcaggcccaggcctgtgtctggcctcatctcaggccgtgcagacatctgggcccggctgcgggttctatgtttatgggaggcgggtgaggacatgaccacctaggccccggggcgggttaagcagcctgattgaacgtcgctgctaattaagggcccctgtcatctggcaggaccgccggggtaccttctgcacttgttcatgaccacagcacctcactcagaaattaactcttgatgagtgcagacaggggcccagctggtcctccgagtcctgccaagcagataaatgaaatgtaatcaggatgctgctgactgccaagagaagaggggctctgcgtgacctcttggtgaaacccagagtctactttcagcgtgacttaattctctgcactagagacacttaatgcagccaggaatggtgtgaataggcccgtggccacagggagggcactgggaagtccatcctcgaatgtccactttattaagtctaagctaaaagaataaagaggcagtgcaggagaatctaattttcaattggcagatactttctctaggagagaggtgctattttcttcatgactcttcacaggtctggggacgatggtggcttgttacagtttgcaaactgtagaatcatttcgctcgggtttaaaatgttgaacactcatttttctagcacttgtggaggaacgcttgcccctaagttctgtttaaaaagaggaaagtagtggttattactgcctgggccttccagacacagaaactagatagagagagacattctggcttgtacagcaaagctgcagctcggggcaggagactagaatccaggagtctcgcacctcggttttggacactctggtcagagcgttcgccaccactttatttcagaaagtcaacgtgtagcaggtgatgatggggaagggcgtggggccaggagactggacagcgagcagggtcgcagcctcactgcaccggcccctggagaacgactccacgggtggctcctgcatgtgacatactccttgagaagggacgagaaaggcaggctgcagaccatggctccagaccacaaggaagatgcgtctctctatgacttccgaaaggcacggagacggcctccaaagaaaaggatgaaatgacggcaagagtcatcttttgctaacacatctaaaaagtggtgactgggccggaagcaaagggaaaatgaagaaatgggcaggaaaggcatttgatgccctgataaaacattttaaaaaactaaaaaggtgttggggagaaactgtaacaactcccaaaggactaaaggtggaggtggggtaaggtgggaggagtcaggaaaggtactcaattgcttgagagaatgtcatggtttcctactggcgcacagcaaagcaaccccacactgagcagcccaagggcttctcaggtggcactagtggtaaagaagcggtctgccaatgcaggagataagagatgtgggtttgatccctaggtcgggaagatcccctggagaaaggcatggcaacccacttcagtaatcttgccatggacagaggggcctggtgggctacagttcacagggttgcaaagagtcggtcggacacaactgaagtgactagcatacatgaacagcttaaaactacacacagcaaccgtctcctagtttctgggaatcaagagtctgggagtggctcagttggctacttttagctcaatagccccaggtgtcagctagggaatggtcatcgcaaggcttgactggggagggttcccttccaagctcactttcatgggcgccgggaggtctcagcttcccatgaaagcgaacaatctttttctgccatgtgggcctccccatcggactagtcactgcccattagcttgctcctcccttagtgacaactccaaaagacagagagggtgagaaaaagctagcaggacagaagtcacggtcttttttgtaacgtaacctcagaagtgatgttccattactttgtcatattcggtttgttaaatgcgagccatgaggtccagcccacactcaagtagtggggcttacagaagagcatgaagacccgaaggcagatcactgggatcatcccaaaggcagcttaccaaagagattccttactccttggataaacctagagaggcactcttccacagtgagcctctacagctcagtcactctgctgtgtccagctctttttgaccccatggactgcagcgctctccagactatatgattaggctatgccaggagaaatctcaataacctcagatatgcagatgacaccacacttatggcagaaagcgaagaactaaacctcttgatgaaagtgaaagaggaaagtgaaaatgttggcttaaaactcaacattcagaaaacta

SEQ ID NO: 64394 - DNA, 1699 bp, Bovine  19866880499011
  misc_feature (1)..(1): n is a, c, g, or t
ncggagttgtgcagacctaaggcaggcaggaaggctgctttggcgagagagctggtctttgtcaggtaccttaggtctgtcgataagtcgttggatcattcagtctgtcattcagactgttttaagtgctgttgtccagttttgccagttttgtcagccaggctcccagtgagttttgtgtaaattaccagactctgtgttcagttcttctttgtaccagaaaggctcgagtcatttctcccggcacctcccattcctgacgtgtctggttttgtctcgttttagagggccttgctccccaaatttctcatcagaggacatctcaactcgaccaactgtgtgatcacacagccactgacgggagagctggtggtggagagctcagaggccgccatcaaaagcatcgagctgcagcttgtgcgcgtggagacgtgcggtaaggccccctgaccctccgctgcccccggcccacagccacgagctcgcctctcatctccagggtcctgcagggccagcgggacagcaggggactctcctgttgatgcaccttctctgagtcactggctgctgcctcagcctgaacggacgtgcgctgtgtcctgaccccacgatgccctctccctgctccaggctgtgcagaaggctacgcccgcgatgccacagagattcagaacattcagatcgccgacggggacgtgtgtcggggcctctccatccccatctacatggtcttcccccggctattcacctgcccgacgctagagaccaccaacttcaaagtgggtacgtgcgtgccctcagggtgcccctgggagggggtggatctgctggtctgctgatctcaggtgcagcgcggagcacccagccctttggttgctgcacaaaaatgcgtgcagagcagctgggtggcgcccagggttgaacttgcttcgtcccccaggagacagcgtgggctgctcacgtgacaacatgctctctgaaggacactaacttggccagggaccagccagccaagctcgtggggaggtcggatcagccctctgatgggctggtatttgatggggacacaagacctgtgacagcccagtgaacagtcatcttcccaagggctgaggctccggcagctgagggggagtcagtggttttctgtgatcgcacgacagatacttggaccacaagatctgagtcgcgttaagacgcacttttcaatcctgctttttctcccttcaccttgtattgtggttgaatctgcagatagagaactgcagttgtggtgaaattgccaaataaggggcagcctgtaaattccgtgtggatgtgtgactgggtgggagcctccctgaccttggttgttcgagagtcagctgcacctttgatttttaagttaaggaggaggagcttatctgtcgatttttcaacttggttttgctacgtaaactttaagaaacatccaaaaattgttcttttctgctacactatgcattaggtacctgtactgtctgcaccttatttctgtcagaccttacaaagcgtctgtgtagcatttaatgtagcgcccacgattcctccatagaaataacgccctcagcccatcagccaagacactggtggtgcttttgtcctggtggctcctgttttgtgtgcttgggggcttgtgcagcgaccaccccttcagcgagggggtcccgcgggaaggagg

SEQ ID NO: 64395 - DNA, 3150 bp, Bovine  19866880572654
  misc_feature (1)..(1): n is a, c, g, or t
natggaaacagtgacagactttaatttcttgggctccaaaatcactgcagatggtgactgcagccatgaaattaaaagacgcttactccttggaagaaaagttaagaccaacctagacagcatattaaaaagcagagacattagtttgccaacaaagatccatccagtcaaagctatggtttttccagtagtcatgtatggatgtgagagttggactataaagaaagcagagtgccaaagaattgatgcttttgaactgtggtgttggagaagactcttgagagtcccttggactgcaagcagatctcaccagtccatcataaaggaaatcagtcctgaatattcattggaaggactggggctgaagctgaaactccaatactttggccacctgatgcaaagaactgactcattgaaaaagaccctgatgctgggaaagattgaaggcaggaggagaaggggatgacagaggatgaaatggttggatggcctcaccgactcaatggacatgagtttgagcaaactccgggagttggtgatggacagggaagcctggcgtgctgcagtctgtggggtcacaaagagtcagacacgactgagcaactgaactgagctgactcaactgtcagctatttatattatacttggtattataaggaacttgagatgctttaacgtgtatgggaggatgtgcataggttatatatgcaaatactatgccattttatacaaaggacttgagcatcctccattttggctcaggggaggaggctggcgcagctacctgcagataccaagggacaagggtgtgtgtgacatgtccaaagttagctggaagcggcaagctctcctcgaacccctgctcagctcagcatccccgagccatctgcactgacaggtggatttgtttttgactcagctctgcccccatctctgctgggttcgggtggcctgtgggcggagctcagttcctggccagctttgcgtctcatagaccgcgggcacagagctgtcactttctttcaaaccatcaacctgtttgcggaggaactgcctggctgggccttggactgttcctgacctctatctggggttgcagaggctgtgtccagtgaggcccagaaagcaaagctcaaggcagctccctcttctgaggccttctaaggggtcacacggtgaaggacagggggattcttctctgcttacaggtaactggagagcacaggtcagtcttggaaagggagtccccatctttggttgaaagaacctgacctcacggttggtgaggatgcggttgaatgggatgatggatggcaccttgtccagcacagggatcactgaaggagaggttctgtcacccctttgtggagagggctgtggtgggcacccacaggctaagtgctggtttgggggctgggacctttgggatcccagcactgatgatgtcgttatccacggcaggcccatcttgggggaagagactcctttcccacctgcctttggcttaggtggggtgagaaagccgggaccagcccagctgcgtacctgagtggaccacagtgtcagcaacagacatttcgacacaatccagtgtttgctaattgctctcgtgtactctggacacaggaagatttaaccttttggatgagatagataccagtaactttccagctgagaagccagggattatctgataagtgacaaccaaaaacttatgtcttaaactataaagaggtcaaaagaatggaacgtgggttctcagcaggaatctgcacaaaagtctgtgtaatcaaacctatggttttcctggtggtcctatacagaagtgagagctggacaataaagaaggctgagtgccaaagaattgatgcttctgaattgtgctggagaagactcttgagagtcccttagacagcaaggagatcaaaccagtcaatcctaaaggaaatcaaccctgaatattcattggaaggactgatgctgaagctccaatactttggccacctgatgagaagagctgactcattggaatagactgatgctcggaaagattgagggcaggaggaaaaggagatgacagatgatgagatggttagatagcatcatggactcagtggatatgaatttgggcaagctctgggagatagtgaaggacaataaatcctgtcatgctgcagtctatgagtgcaaagagttgcacacaacctagcaactgaacaacaacagcagtgctcactattcacaatagccaagaggtggctattcacaataacccggatgctcataggcgggtaaatggataagcaaagagtggactagccaaatgatggaatatttcttagccttaaaaaggaatgaaattctgatatatgctaccacgtggatgaaccttgaagacattatgctaagtgaaataatccagtcacaacaggtcactgttatatgattcagctaacttataaggtctgagtagcacagtaaagaatctacctgcaatgcaggagacctgggtttgatccctgggttgggaagatcccctggagaaggaaatggcaatgcactctagtaatcttgtctggggaattccatggacagaggaacctggtgggctacagtccatagggttgccagagttggacacaacttagcaactaaaccaccaccaaagtagtgagagtcaagttggattcagaagcatccctcttctagctacttctgacaaactaatgccaaatccagatcctggccacctggcaggaagaaccactccttctcaggggatttaaggtcatgagcattttctgcagcaaatgcttcctttctcatgggctcatcgtggttataccactctgcctgagtgggcaggcctggcattgcaggaggaggaggtgtgcagccgtgaagccaactgcaggcctctgcgggcgggtagcatcaggtggggctagagaaggctgccaggtcatccacctgccgacccggcctccctggactcctcctaattgctaccccttgcctcagacaatcccgtgatgccaggtgtctcacctcgggctgcttcgtgccttgtaatttactaagtgctctcgcacagactgttactgaatcacgcagacacctctaagaggcagctgctatcatcgccaggca

SEQ ID NO: 64396 - DNA, 1722 bp, Bovine  19866880715118
  misc_feature (1)..(1): n is a, c, g, or t
ntcaaggttcttgctttctcaaaatgattaagagcttctaaaaatctaaagtcagaattacgaagaaggtattaaagatgagacatgaatttccactccccacaaggcacagagatttcaagcttaccaggaagagtacatttgacaaatcactgcacagaaatattcatggtaacccatattttcttcaaaaaaccaagacattatcactctttgttacaaaagtaatataaattaaacacaaatgtaccaggacactggttttactatggtaggtgcacactagttttaagctgtaatttattttttaaagttttccacaattaacacagaaaattgaacaaatttggttgttccatttttatttaatttactaatctaattaaaggaggtccttgtagtgcaacatcatagatccatttcaactaattaatcataaacagggaaatttttttttaacttgattcatttaaaatggctataataaaatctctctgctataaaactgttaaagagcgtgtgtattctggacatctttcttcagctataaagcagttgattattttaacacaacaaatgtgtatgtaaacttgttttactataaatgtgatatgttttagtgccaatttacagttaaaaaaaaataccaatagattcccaaagttcattcaaccaaagaatattagaataatgaattataaggttctcccagtctctattcttcttgttagactacagaagcaaaaggtttcctgttcttcaatcttgaaaccatcttccaattgaagaagtcatttttacctttgcacagatgacttcacctacagaaaagctagaccaccatccaccgtaagacggttataaacagcaagactttaaaccagagactacacattacaacagcaaaaatccagctagcttattggtcactggatgccgaactgtattatttagaaattaaaatttaaaagcctttccacaacattgtaaatcaattatacttcaataaaatttttaaaaattttaaatgactttcaaaatggtaaaagacttcttcacttatcacaacctccatgatgttacatatttgttattttcctagatctagtgaatatgtacatgtggtcactgcattaaacgggtgtgtcctaaacaacttatgctaaaccttcaaattaattgcatttgttattaccgtggagatgactgcaaaatcctcactacctctgattctttatcagtttcagaatcagtccttccaatgaatattcagggttgaattttcctttaggattgactggtttgatctcctcaccgtccaagggactctcaagggtcttctccagaacaattcaaaagcatcaattctttggcactcagccttctttacagtccatctcttggatccatgcatgactactggaaaaatcatagctttgactatacggacctttgtcagcaaagtgtctttgcttaatacactgtctaggttgtcataggtctcctttcaaggtgcaagcatcttttaatttcatggttgcagtcaccgtctgcagtgattttggagcctaagaaaataaaatctgtcactgctttcacttttccccttctatttgccatgaagtgatgggactggatgccacgaccttccttagttttttttttaaagttgagctttaagccagctttctcactctcctctttcaccctcattaagaggct

SEQ ID NO: 64397 - DNA, 1459 bp, Bovine  19866880733788
  misc_feature (1)..(1): n is a, c, g, or t
ncctgatcaaagcgttctccctgagttaccgcactgggtggaccccggttccccacccactccttctctggctgcccaagcctttccttcattcccttccaagccctcacacacaaatctccaccttactattacaaatgcagacatccccccaagaaaacgggcttcccatgtggctcagtggcaaagaatccacctgccaacgcaggagacgtgggttcaatccctgcgttgggaagatctcttggagaaggaaatggctacccactctaggattcttgcctgggaaatcccatggatgcaggagcctggcaggctacagtccatgggggtctcacagtcggagacgactgaggtgactaaacaacctgaggaaacaccctccgccttactgagcggacatcagctctctgggcacggacggtagagcgtcctcgccccgggtgagagcgaggtcagtccactctaaataaacagccatttggtggtggttaataaattaatttttaaagaaaggtcaccacggggaatggaatgccttgtgcccctcccagtcgcctcagaggccccgactccccccagtgggtggggctttcacgtttacccataattcctccgcccaggctggggccggggagcttccctttaacatggcggccagtctgccacgtttccatgctcaggtctaaaaaacatcacccccggaaattatacagtttgggggagagccccacgtctcacacaattaccataaaacaatgagatcagttcagaccccaaaaaataactctgaagatgagaaatcggggagaaaactaaccgcttgtgaacctcaaagcctgaacactcggttggctgtggaaatgagtcccacacagaccccacctctcccagacccactcctactgtgttgttggctcacctcagacgtgaaccccacggggaaactggatgtgtctcgccataatcccaactctcatttactgtcattgtccaaacactttttaaaggcatggaaggtaaaatgaaaccagagctaatggcggaaagcccactcccctgcaatcaactcactgtaatttttaaaacaataacacatccaatatcttgtaaaagcctgtagtgaaaaagaatctgacaaagaatatatataaaagcgttatcactttgctgtcacctgaaacttaacattgtgagcccctatacttcaattaaaacaaacacacacaacataacgttctgagggattctcttaagattccagcggtcattgtccaactttaaacaaccgcacagggaaagcactagattcagcagcagcgtgctcttctagctctcattttgttagaaattacttctttagagttgtattcctgttcatttatgcagccagaccatttccaaggacttaagcaccagaggtcacagctacaattaaggccccatctcatctcagaaa

SEQ ID NO: 64398 - DNA, 2844 bp, Bovine  19866880746758
  misc_feature (1)..(1): n is a, c, g, or t
nacagtgcttcctgtgctcctaaggagcaggcagttacacgaagtggtggctagaaggcggaaatggacttagctagcctgccttctcaggtcaccaccactgccctcggtgtttatgtcaacgactctgggtccccaagtgaggtgctgcagactgaagtcaggggaggaggcagacaagaggatgtgaagctaccagcaagtcagagaacttggggggctccaactaaagaatttgttctgaaaccattttcaggcacaattcagcaagttcatgtcccggtataccctcattctgtaccttaaagtctggatcagttatatatatctggattttggaatatccatggcacttctgatagcaacaagtggcatccggcactggagggaacctgcattcttcaacaaatttctctaacagcatctacaacaaaagtaaacaaaaatgatatgacaacactaattcatcaatcaaattctttcaataatctcttgccattaaaatattttcagcacacaaaggaccaaatgccttttagccaagaaactacatacaacttataaagtttttcctcctggagagaggctgatacagagacatgctgagaaaagaatggaagaaaaggactgaacaaaaaattttcagaatttcagactgaatcaaaaccttagcctttgttgtaatcctcaaacctcattttacaatacatacctcttaaaaacctcctttaagcattcagaggcgcctaatgaggtagaattagccttaggactccactttctgcccagggtcacttcacctgggacatcctcccacccctactgacattcctcctcctccctgaaccccggaacttgtgcttgcccatcccctgaagagttacaccactgccaccgaagtccccgacactcatgccaggcttcccaggatggttcactgttatcagtatcaatagttccaatgcctccatcccagtccagaataaagagaggaaaatccaacagtccctctgttttatttcttctaacagttttgttcacatataattcatgtaccatacaattcatgcacttaaagtgtatagttcagtggtttgttagtatattcggagtcatgtaaccatcaccatagcctaaatttaaaacattttcaccactcaacaagaaatcccatacccatgagtaatccctcatctttcctcagtcccctatcccctgacaaccactaatatactatctgccttcaaatatagattttcctattgtgagcacttcattggaggtccagttgttaacactctgtgtgattccattgcagggggcacaggttcgatccctggttgggcaactaagatcccacatgctacatggtgtagcccccaaagaaaaaagtcctactgtggagattccagataaacagaatcacacagtatctggcatttcgtacctggattctttcactcagtgtaacattttcaaggttcatctatgttgtagcatgtatcattacttcactcctttttatggccaaatgtgttacatggatacaccacattttatttaaccattcatcagctaatagcctttgagttctttccactttttgactatttttaataatgctactatgaacatttatgtttaagttttcgggagaacttatgtgttcctgtctctgagtatatttaggactgaaactgctcagccatttggtaactctatctttaaccaatgaagaactgccagattggtttccaaagcagctccaccattttaaattttatagcaatgtatgggggttctgatttctccacatccttgccaacacttgtattgtctttttgattacagccaccctaatgggtgtgaaatggtaccctgttctcatttgcatttctctgatggctaattgttgaaaacactttgcacatttatcatctatttatacaagctgttggcagatactcctatgcagatctttcagctacttttagagtaagagttgatgcctgtgcttgtaaaagctttagttaaaagcaagttctgagtatacatcagggctcaccacaagttacagcctatcccagtcaagttacatgatttagtctttctagaactggcaaagcaccccatgattctggatatgagaccaatttatactttttaggtcttcagtgtcaataactacagaaattataaggaaacaatcatgtgaaatccttctctaagtacaaccagcacacaacagtgcactctagccagaatgcctggattcaagtcccagctccaccatttccgagctgtttaatcttgaactcatcactgcggctgctgccaagtcacttcagtcatgtccgactctgtgcaaccctatagatggcagcccaccaggctcccccgtccccgggattctccaggcaagaacactggagtgggttgccatttccttctccagtgcatgaaagtgaaaagtgaaaggaagttgctcagttgtgtccgactcttagcgaccccaggcaagagtactggagtggggtgccattgccttctccggaactcatcactaaatctgtctaaacataatcttcctcatctgtcaaacgggaataatcacagtgctcatcacatagggttgctagaagaggtacaggtaatgataaatggaaggtgtatgattggcaaataggaaataccaaataaatgttggtgactccaccagtttttaaaggggaaatgaaggagctgaggacagagtgtcatcttatacttaagtcaagagcacaggagtgcagatgagcttttatggttagtaagaagctctacagaaataattacctttatctt

SEQ ID NO: 64399 - DNA, 804 bp, Bovine  19866880812594
  misc_feature (1)..(1): n is a, c, g, or t
nacaccgtgtctctggcctgatatttacaatccctccagcaagcaaaatgcaattggcacctgccccagtagccaggattaatagcggagagcattgtggttttgttattaagttactctcggcaattagtaaatttattgttctaattgttttcacatggctgctccaccacacatgtcttacttcgaggatgtccttacagtcttgcccccatcatcatatttcaatgtgatcactgcccatctccgcaaactgtccaatcccatcaaaagctgatttgcagtcgggtcagagggaaggaggagtaagagttcattccaaagtccaaggcatatttggataaaacccggagaaattttgttttggcttattgagcgtctgcgactgcactcccagatggaggggctggggaggggatggccatctgtggttgatgcttgggtgttggtgctcagtcggtcagtcatgtcagactcggtgacccacatggactgtagtccgcctggctcctctgtccgtgagatttcccaagcaagaatattggagtgggtagccatgccctcctccaggggatcttccccacccagggactgaaccccggtcttccacattgtgggcagattctttactgtctgagccaccagggaagccccagggattgattgcacaggaaaagtccaaattcttcccagcttcaaattcgttactctttctaaatcgcaacttccggtccctcttaatcctccaatggaatcgtcagatagtggggggcaggggtgacttcctggggcctgggagaaaga

SEQ ID NO: 64400 - DNA, 1328 bp, Bovine  19866880844667
  misc_feature (1)..(1): n is a, c, g, or t
ncttattattactctagttctaattgtaggtaacagtgctctgtcctaacacattccaatcaggcctcataattactcaagtcaatttaataacactgagctacagtgtacccagcacaaagttcaactaaaatttctgaaaacaaaagcctgggaaactactttctaagatatatttaatataaaaaaaattttttaacatcttatttcaacattataactctcaagtcaaaatcagacattttttgaaacattctcataaaaatgtaataaactaattcaaacgcagtaggtaataaccaacatttatgttaaaagtttacgagacctcattttctatattttaagttgttctataaaaaagattttattaataagtggtaaataattttattgcaacaaaactataattatgcctccagccaaacatattcatttccaaggcaaagtagtacctaaaacttaacactgaagaattttagaagatgatggggacagaataagattatagaacaaaaacctgaactttgggatcagagagacctaacttcttatttaggttctactacttaacagacgaaagcagtatcatttaacctctcaaagtttactcatttctaaaataggatcacagcagctaccttgcagggctattataaagaaaagagcacacagaaagtgtcagaaacaagtccaacaacagacgcccaatacatgatactggtcgtctaatttcaccataaaatctagcctataattaaaggcttccaaaacaacaaagagaaccacctctactcatgtaatacagcccagcatctaataaatatcaggaaaacctgtcttcatatttaagcttaatttctaacacccaggtcaagagtacaaagtatgccctctactcagcagaaatggcaaataatcagtcaccatcaactgaagagtcaagtacttcctgtttcaagatccctataaaaacactatggtttttcctgtgttcatgtatggatttgagagttggactgtgaagaaagctgagtgccgaagaattgatgcttttgaactgtggtgttgggagaagactcttgagagtcccttggactgcaaggagatccaaccagtccattctgaaggagatcagccctgggatttctttggagggaatgatgctgaagctgaaactccagtactttggccaccccatgtgaagagttgactcattggaaaagactctgatgctgggagggattgggggcaagaggagaaggggacgacagaggatgagatggctggatggcatcactgactcgatggatgtgagtctgagtgaa

SEQ ID NO: 64401 - DNA, 790 bp, Bovine  19866880874726
  misc_feature (1)..(1): n is a, c, g, or t
nggatacatagggtatgcatacaacatgaatgttgtacgggaggaaccagcacaacattgcaaagcaattatcctccaaataaaaaatttttaattaaagaaacagaagtcagcaaaggagaaaaacagaatttgaacacagaaaaaaaaaaaatttgtgtttctaacaaagttctcaggtcaggctgaggctgggaggtctccctttgaaaatgatagttaccaagaatgttccccaatttaagatttgcctgatgcctcacaatcagattcggtttaaacacacactggggcaggaaagccttcagtgatgcagtgtccttcccagcgcgtcccacctggaggcacgggattgcccgtttgtccccattcttggtgacgctcactcaaggtggtatcccccaggtttatccatcagtcaaagaggattacccagacctgtgtttattttcttgctttaagatgttaaactattgccttagtaaagggattttaagaggatgcagacaagccagcactgacctgtgtacccagtacttatagtagagaggaagaacgccgttgggcccctggtcctgaaacacgtcaatcagcttctccagcacggtcaccgttcgggcgatgagacagtcggctctcaggggctgtagctgtgccccgtgttccttattgtattctgtgatgagatcattgatgcatatggtagggttgctgttcgtcacgttaaatccacagcctgaacggagagaaacgaggacaaggtgagcagctcaacctactagacatcaca

SEQ ID NO: 64402 - DNA, 1228 bp, Bovine  19866880910740
  misc_feature (1)..(1): n is a, c, g, or t
ntggactggctcccctgtctatgggatttccaggcaggaatactggaaagtataaatggcaatagactaacagacagagcacaccctgtgcacacacacaagttctggggagcagcgaagatccctttcttgaacgcacttaacttactgctgtgtttaaataactacatcactccccattccttatacctattaagagttccagggattttagcataattatggcattttggaaactaaaaagcaaaaccagttttatccctctgccaggtgacagtgttgtctggggactgatgcttctcccggtgaaagcagttaaattagagctcttcacacgggaggggagaggctgctccgtgggccccataaaattggaagcgaaaaccctgcgtgtgtgcgtgtgtgtgtgtgtgagtgcacgcacacgcgcatgcatcctcctttggagaaagctcacaccctttgtcaagttctcaaaggtgtcctcggccccagaaaggtctggaaccggagctcgaggtcgtccgcggggggcagcctctgcacgggcgggtccggctaaccgtccctcgggactcctgtccccttgtgcttgcagtgctggtgaagggccaggtcaccaccaagtactaccggctgctgtccaagctgggcggctgggtgtgggtgcagagctacgccaccgtcgtgcacaacagccgctcgtcccggccgcactgcatcgtgagtgtcaattatgtcctcacgtaagtcagacgtatttgtttctctccttgctctctccttcccaccgccctaccccccgccaccccatcctgcatccaatcggtcctatacgctccatctctccctccctgtctctttctggaactgttcatttgtctcctgctctgttctattggacagtctggttgtctgggaggttctgaacgatttttgtgtcagcatcgagggcagcggtgggaacatgctcctgccctggacacagcggccccgggtgcggggatgtgagcggcagagggcgagcaggcgatgccaccctatcttgaacacgacagaaagggggtgcacatcccagaccgagaatacaaagataacactctctgggaccactaacattcgggccatcatgcttgctcctcccactttttccatgtctgcctatacagcctgtcgtaaatggtaatgaatatttactgcctttaagtcctcagaagttaagttcagt

SEQ ID NO: 64403 - DNA, 757 bp, Bovine  19866880911768
  misc_feature (1)..(1): n is a, c, g, or t
ntgcctacctcacaagaaactaggaagttagctaagcccaaaaaacacgaagatgaagacgaagctgagagcaaacccttaccccgcacaggtaacagccaccacccgccagggctcggggcacctgaatgaagtgtgaggcctcggccgcgttcaggggtctctctgcctgggagtttctctgggggaggcaaagtccctctggccgtcctgcccccagggtagagagtcggcctgggggacacaggccaagctgatggccaggtgagtgagtcagatcttggagacagaagactccctcagagaggctgatcagagtccatgcagtcggggctcaggactctggggccccatgtttccagagcgtttttgtctggaatggaaacacttccatctctttttttaaaaaaggcttttgcaagctctccgaaggtgcaagtggcttgtgttgtcacttgggggtgaggcgatctctttccacgcggggtgggggtagtagggggttccccggagggctgtcggccggccgcctgtcccatgtgggaccgcgccagtggccctgggacaccggcaggcaccatggggtgggcaggcagcttgccgccggccgcctgccccggcaggcccttcatctatcttctttgcttggcagcagtacggctcgttccaaatggacaaactggagtgcggccagctcggaagctggagggccagcccccctgcccacggcccagctcccccagaacagcagctccat

SEQ ID NO: 64404 - DNA, 2130 bp, Bovine  19866880943923
  misc_feature (1)..(1): n is a, c, g, or t
nttttttatttcctatattttttaaattatatagttaagaatcggcccaattgttccctgccacacacataaacaaatcgatgtacttgagtcgcagtcatcagtgcctatctatagctcacttgaaagacattctagaatatgtcttaagacattataagatgtaattaggacacttctggaatacgtctgacttaacattagttaactataagacaaatcttaaatttcagtatgccaattatatagtaaaaactttttcctttttgtttctctatgttttgccagtggtaaaatctcatcatttaacaaaagaacaggtgggaaaataattattgtgttcaacagactttgctttgattcattttaaaaggcaattcatctttctttctcagatctggaaactaaattaagataagtactccagcattgactaaaatgtgaacttggaaattatccagtaaattatttccatgtagtcattcagaatggtcagggaggaaatgaaagtgtatcattagaacaaaaaattagaaagcattgaaactacaggatatataattaagtccgatgcagagtattttcaaataagtttctaaatattatttaatagaagcaatgtctcagaaagtatttgcctttagaaactatgatttgtatagttctagataaatataaaacggagaaggcaatggcaccccactccagtactcttgcctggaaaatcccatggatggaggagcctggtaggcccgcagtccatgggctctgtaggagtcggacgcgactgagcgacttcactttcacttttcactttcatgcattggagaaggaaatggcaacccactccagtgttcttgcctggagaatcccagggatggcagagcctggtgggctgccctctctggggtcgcacagagtcggacacgactgaagcgacttagcagcagcagcagcagcgtctcttgttatgcttaagaaatatggatggtgctcagtgacaagcatctgtgaactcgtgagcacagcagggctggaaggaattggaaacacaggggtctcctccagagcagctcatgccttcaaacacagtttaatatattcaaaatgggagcaaatgatgacagtatgcagatgccaaagtactaacaacctttgacacaaattactgaaatcgacagcttccctggtggctcaatggtcaagaatctgcctgctgaagacacaagctggatcaggaagatccccttggaggaggaaatgacaacccactccagtatttcttgtgtatgaaatcccatggccagagaagcctggcgggctatatagtccatggggttgcaaagagttggacacaagtaaatgcatgtgcgctgaaatcgacttcacagtttctgtgccacacacactgccaagcatatagtacatacttcacacacatacgaagaatgactatggatgtttctaaccgaagctaggaaatttgggaccgtgattcctttatggctcaataaacaaattattatttcatgagagacaaacgtctgaaagtcccacatggttcaagccctttctttcacagaatgagacatgctgccttgggtagtaataactggtgagcgaaccctggaacaaatgagggcatggttcttgccattcatctctcccccagcctgggataatgccctgtgcagagcaaatacctaataaatctaaatgcatgtctaatgaatgagtggataaatattcattaaaaattaactcgacagttaatttaggtcactcactggaaaaaagaaaaacaggaaaactagaaaagtatctttttaatttaaaaggttaattaaggacaaggttttaaaaaaatattttggtggcttaagtaaactgagcacaactggggttcaaaacagctgcaattagtaactctgaaaacattccattatgttccacaaattagaaaaagggggaaaactgcctgattcgcttcatgattctagaataatctcagttctaagtaagtaagcaagaaaaaaaaaaaggaggccctcttcacttataaacattgatgtgaaaattctaaatgagatgctggctaaccaaattcaatggtgcatcttatgtataata

SEQ ID NO: 64405 - DNA, 935 bp, Bovine  19866881053418
  misc_feature (1)..(1): n is a, c, g, or t
nctaacaccgtgctcttctctgtggttttttaagtaaaaataagtattaatttaatatggaacaaaatgcctactgcaaaataaaaagagccgaatgaaatggcaacaaccatgtcagccaaagatacatgcaaaaagtagtcacaccctgaaggtcgagagaaattgaccgacgtcgacaaagaagaaaccacaactcctggatggctgtcacccatggctggtgaatatttttagtgtcgggcaatataaaacccagaggaccacgcagcaggggacccaaggctcccaggcatgacggccaccaccaggtgacaaaatccagagacaaccgcttgattacttaataactgtgtggaaatggaaaggggtcggttatctgcaaaaaccctacaaaaacaaacaaaaaatgattgcctgggcccacttcacagagggagtgtctcagctaccagcagtgttgttactatttgcaaatgggaaacacacatttcttgttaattctaccccacatgatgctgattcattctgataaccctggtctcagaaatactcaccttaaaagttacatgtaattactacactctcccatgccccccaccacaatctgcactctaaggatgagagctgcgagggaagcccctgtccccatccgggccttcggctcagcagactgcatgatacatgactcctggctaatgagtattttcagagcttttccgaattgagtgcgtgctgaaaagcacactgcttattctactttggcctttctttctatcatttatttcatgttccagccatagttttgagtaaaaggtgttcggacttgcctcagaggacaaaagaatagtacactggatgtcagaaagtcagtttccaggcagctcaaggttgccctcatggaaatggtggaggaagcagagggtgaatgaagg

SEQ ID NO: 64406 - DNA, 1470 bp, Bovine  19866881072180
  misc_feature (1)..(1): n is a, c, g, or t
nctgcctctcacatgccccagtgaccgagggctgttcttccttttcagcgctcagcaagtccgcctgggaagcgctgagggaccacaggcgtggatagctggcctggatgactccgggttccttctggtccaccaggaagacggtgatgtggtcacggtgcatcccgacggcaactccttcgacatgctgagaaacctcatcgtccccaaacagcagtagtcccggctggggactgacgggacagactgaagggcagaactgaggcgggaggcttccccttggatttctgtcgcctttcctagcccgtggagccggaaaaactaaatcagagttgttgatgatttttttccctccaattaacctgttcattcttaaattttgttcagggtagagggtcgatcactgaaaagatttagttcaggtaaagacctgccatagatatgagatttgttctcccctcttgaaattggatgtgtgttaattggcaaaaaaaaaaaagtttttacatggaaacagcaatggaataattcacgttttcccagtagaggagatctttgtgcgtgctcagtcacgtccgactctttgcaaccccacggactgtagctcaccaggctcctctgtccgtgggattctccaggcaaggatactggagtgggttgccatgccctcctccaggggatcttcccggcccaggtattgcctctcttgcatatcctgcaatggcaggtggattatttgccactagccacctgggaagcccagtgaagatctttatccgtagactattaaaaaaatttttttaaaagctttcaggccctggtcattggtgagttaggagtatggtaacactgtttacaagaatccagggagatgttttcctataggaacatacactggtccttagtcatcattttttgtttgtttagtgaagaaaagagaaggtaggtttctaagccttattctcagcctggtggtttgtggtccaatagcagtgtctacatggctacagaggcaccctcgcagctctggctgtaatgacctcgtagaaggaatcagttcattactttgacattaattaatgagctttcctaactttaaattgatggactattctgccgtgatgggatcaagttcaagatccttaaagcattgattaggtaattgcttggatgtgagggtgggtgatttggctccaacagctggagatgaagtctccctctcataccacatgcaaaggaggatttggagctttaagccagctgcgggcttgctttgaaatatagagcattcctgcaggactgtatagacgtacacagtatagacgtacatggcattttattgctaagtcacagttttttgcccccttttcacattgccaaaaaaagttattgctattgcataccgtcagttaagagcgcgcgcgcgcacgtgtgtgtgtgtgtgtgtgtgtgtgtaagtcttaaaagaag

SEQ ID NO: 64407 - DNA, 1077 bp, Bovine  19866881073724
  misc_feature (1)..(1): n is a, c, g, or t
ngcttgagttcggcttttaaaatggtttttatttaaaagaatacaaacttccctttgggggaagggtagaaatgtgcactgtatctccagcaaaagagtcaacataaacttttttttcccccaagaaaaggaaagcgggggtgggggggaaaccctcactctgagaatttcctcagctccattctacctgtttaactcacagggggaaggttttcctctgcattcccaggaaatgagcaggcatagctctcggtgcctgctaagtcgcttcagtcgtgtctgcctctttgcgaccccatggactgtagcccgccaggctcctctgtccctgggattctccaggcaagaatcctggagtgggttgccgcgcccttctctaggggatcttcccaacccagggatcgaacctgtggtctcctgcactggcaggcgggttctttcccactagtgccacctgggaagccccctagctctcagtaggacttgttaaagtcaaaaatcagacccgtcagtgcagccgccaggatgtctctgaaatactttctgggcgtgagggtagtagcagggcggaggtgacagtgaggtggtactctgttcagagggtgggttccagagcacccctgcgctgagaagagggaccacgctcagaaagcgcttcctcctctgtctggctcggggaacggagtggagcgttagacacagtgagaaaagtagaatacttaaaggccaaaacacccagagcgcctctctgtgaccctggcgggcagagcctcgtggtgcccaggtgcggtgagggggagcccttggctggctaagaagagcctggccacccggggcaagggccgggccgggccaacaggcacagggcatgccagcgagcaggcagcccccttgtctgggtgccaagcccacttccatctcacatgaaatacagctccagaggtatttctcttggacaccatgaataacccattgagatcggctctgcttatacgctgctgggctccaagaataaagcgtccttttcttgcgtggaaaatccaaagaaggaagctttgtccacgcggggagataaca

SEQ ID NO: 64408 - DNA, 1216 bp, Bovine  19866881129090
  misc_feature (1)..(1): n is a, c, g, or t
naaactggtgtgaaatatcttgctcaatcatatagaatgacagtttatagatgaaaacttcctctctattttggatgagtaaggaaaaatctattttttcataacaagagctggtttgggggaaaatcctgtgttaatatgaataaaagtcatgggatgtggttaaatgcttgcagaggccgttttcaactcagcgagattgaacaaactattgatttagtgaaatctacaagcttaagttaccatgactataaattcctaaaccgtttcccaggaggcattatctctctcatttcaactcaccaaatttcattagaatccattaaaaatgcagtagatcaacatgtttaaaatgaagtgattgaatttcatttaataaaataccctggtgcctctgcataggtttttttttttttttcctgacaagataggtgtatagattggctatgttgttttcatttttcaggggataggtgactaaaaaaatctgccatacaagaaaaatattagaaaagcaaaaaacaaaactcataggttatatggttattttcaaaagtgttagatgatgattaggtagctactagtttgagtgttctctaggaaagctttatgtaagagaggctctgggttgcactgtttccccactaagatatgctgaagtcgtaacccctgcgtccctgtgctcagtcacttcagtcgtgtctgactcggtgactccatggactgtaaccgctgggctcctctgtccatgggatttcccaggcaagaatactggagtgggttgccatgccctcctccaggggatcttcctgtcccagggatagagcttgcatcttctgcatcttctgcattgcaggcggcttctttacctactgaacctcctgggaagccccataatccctaagacctcagaatgtgaccttattgggaaatagggccgttacagatctaacttttagttacaatgaggacctatggggtagggtagacctttaaaccagtaagactggtgtctttatgggaagatgaagaaacacggatgacaccatctgaagatgaaggcagagattggagtgatgatgctgctacaagccaaggacagccaaggatgaccagcagccgtcagaaaggaggagagaggcctggagcagatccttccttgtggcctgcagaaggggccagctggctgcttgagtttggacttcggcctctagaa

SEQ ID NO: 64409 - DNA, 1205 bp, Bovine  19866881145954
  misc_feature (1)..(1): n is a, c, g, or t
nctttaaaatgcttcagaacaagccagactaacaagcaccccccacacatgcactttttgaattaaaatagtataaaatctaaattcctatttcccctgaatatagcagaggagactcggtaaatctgatctctgtaatactccagccaaggaggaaaaactctgatgacctgatattctatctgtcaaagtgaaggaaatgacacagagcttttaatcaatatttatgtaacactcaccaaaagctgtacttgctgaagtaaaatataacctctctctctttaaacaccttttacttgttattcggataggaagttattctttcagaattagctacatctgtcaacccggcattcctggctgccacatataaagtccctaccatttcccaccttctcaataaccttctctttagcttagattttatttatttttgacaactccctggggtttcctgacaggagaaatctttaagacggaagcaatattgttttcacattcagagctacactatttttttattggtgttttcaactcaggagaagacaatgggacaaatccatgccaaatgcagtgagtttttttattattattattaataataataatttactttaaaccttaatgttccaaatcaacatttactttaaaccttaatgttccaactttcttgtctcttttgtcagtttaagaggcgcccagcgtgtgctcaaatgtgttttcgttggatcggcgtaggttagatctctttggcaggaaagcgtgggtgaagcagatgagaattcatcagagtctctctgtgcacagctccatgcccttactactgttgtttcgttcagttcagttcagttcagttcagtcgctcagttgtgtccgactctctgcgaccccatgaatcacagcacaccaggcctccctgtccatctttttcgttatattgccataaattgatcagaatgaatctgtcccctttctgcctctgatcatggcttacaatccattatcaaagacagcatcagcgactcaatggacatgaatttgagtcaactctgggagacagtggaagacagaggagcctggcgtgctgcagtccgtagggtcacaataaacagctggacatgacttagcaacttaacagcaactatcaaagatggggttttgagccttagtcctggctgaaaaacacagattatctcctcctgcct

SEQ ID NO: 64410 - DNA, 1258 bp, Bovine  19866881210198
  misc_feature (1)..(1): n is a, c, g, or t
natatttttcttttgatattttgatattcaaaatattctgcaaatatattgtttaaaaaaatgaacgtgggcatttcttagaattcaagatagattacttcaaggtcatcttatttttttccatatctacattttataatcctatatttcatatatgaaattttttccagcctgaaacgaagactccctactcgctcctcaattttgaatgcaaagaatcggagattgagtaatcaagtatttgaaaattctcatcaagatgatgatgatgatgaagatgtcatcatcttagaagaaaacagcactcccaagcctgcaggagatgatgatactgaagtgaaattgcagcagagccccatggagcagagtggtgtggaagtggagcctgtgggtgacagtgaaccttgtggccagactggctccacaggtacttcgacatcccagtgtgatcagggaactaccacagccacccagactgaagtgccaagtttagtcgttaaaaaggaagagactgttgaagattcgatagatgtaagaaatgacacagccgcactgccagcctgtgtggaaactgaaggaaagacacatgaaacccagggaacctttgataaatctgctagtgacgctagttgcaagttaaatgaactaagaaatgagctgcttctcgttacccaagaaaaagaaaattataaaagacagtgccacatgttcactgaacaaatcaacgtgttacagcagaggatactggaaatgaataacaaatacgtgaagaaggaaacttgccatcagtctactgaaactgatgctgtatttttactggaaagtattaacggtaaacctgaaagtccagaccatgtggtgtctcagtatcgtcaagccttggaagaaatcgaaaggctgaaaaagcagtgtagtgctttgcaacatgtaaaggctgaatgcagtcagtgttccagtagtgagagtaaaagtgaggtggacgaaatggttgtgcagcttgatgacgtatttagacagctggacaaatgcagtgttgagagggaccagtataaaagcgaggtgagttctatccctcagcgtaaggagaggtgtaggtgtccaggggcatcccagccttaactccccagttgctatattgcaataaatcgcttcataatatttccatttctcgactacctgctaatccactggttctcgactgggagtggtcctgatgtgggcatcggaaatgcataaggtcattgggttctttcagcat

SEQ ID NO: 64411 - DNA, 873 bp, Bovine  19866881214311
  misc_feature (1)..(1): n is a, c, g, or t
ngcacttcgggacagcacagcttggagctggtgcaggtttcttggaatggggaggagggagatctaaatttagacctttctatcacaccaaataaacataaattgaaccagagggctcaaaagaattaggcagaatgcctttgcacctaacttctgaaaaatggagaaagaaaagtttgaaaacagaatggtatttattcactcaaatcccaaggtatttgccaaaaaccatgacacttgtttgacacaaaaatacatgttacgaagaggaagactttctctttgaaatatcctgctgcagaggcccgggtcatcaacaccaactgctcaactgtgaaggctcccgtggccaggctgagggctggcccaacttcaagggacagaggatgtgtctgtggcctctagcttggactgtcctcatggttgtttcccgtctgctacacctgctcttgcattcacctgcacgctcccaaggcagggcccccaccagagtaagaagggatcttctaggtttcagcaggggagctgcggcagggctgagggatggggaagcaaagctgctgcgggggaggtggactcagggcctctgcccctgcaggcccgggctccacagtgacctgagtcttctctcctggatgacagccaaaggggagaccacccgggatggggtctgtgtgggcaggggcagcacacacccacaggactgagagtgaggacccccagccaacacagctgaggggagaagctctttcagcctaaagcatttcaaaagggctacgtgtcaaagtcccctgatcaccatggcaactgtgacatgagaagcgttcactaggcaggctgcttctcctacacaagactcctccttcacagatg

SEQ ID NO: 64412 - DNA, 757 bp, Bovine  19866881217766
  misc_feature (1)..(1): n is a, c, g, or t
ncctttggtgatcagggttttacagtgatcacggggctcatgtttagcgcgtcatgacccgaaggttaggtttcttgctctcacttgataagatgggagtgcctaacccgggggaccggctctggagctgtagtgtctctcttctctgccctttcttttaaaggagagatgtttgctctgttcctgccgggcgctgaagaagcaggtgtgtttgtgcaggtctttagggcatctttaaagcaaataggtttgataaaatctttttttcctcttcccttcattctcctgttactcctattgatccaggtctttccacgggcacagagtacgctggccgtgtttgtacagctctgcagagagatagtcgtggaagcctgctgtatagaaactgaccctgtgacggtgaaccggagcccagggggtggccagctacttcctcccctttgagagtttctggcatttggcagattttctcttaaactcctttccccagcgtggcctggttcctttgttgccttatttggagtgcataccagctattgtggagtaataaaacaggaggagaaatcaattccctcctgggccctttatggagccttcaagctcactggggtcgggccctgcacttttcagactcaggtatgttttttggcacgttaaggactgatgtgagtgggctgtgtgtgaagtgctaagttgactgatgttaaaagtgggcttccttggtgtctcagacagtaaagaacccacattccag

SEQ ID NO: 64413 - DNA, 1738 bp, Bovine  19866881220174
  misc_feature (1)..(1): n is a, c, g, or t
natttcagtcgaagcctgactttttccccccaacacttgaattatgggctgaggagataatttgaatttgggggtcctctctgtcatttttttggtaccaaagtctgaaagcaaggatggccacatttactaattcaaaagcaaaaataaatgaataaactctgccaaatgaagtagacttactccaatatgtgcttttaaaaaagtttaataaagggctttgaactgggatgggtttattaacacataaagaatcatttttatactctcagataattcagttatttagatagtgtagattaaaaaaaacaaaacactttgctacgaattatcacacaattatggcaaacctaggagtttatatttcctaggagctgctaacatagattttaacccccaaattaaggtgaaagagtcattacttaaagaaaaattattattgagagtaactgaaacttctgggaacacagagggcatagtgtaaatataagctattatcacccttattcatcagaaaacctttttaaaaggttactcttgactagtgggtaaaattttatcaacacttttatctctggtgatttaaaaaatcttgaggcctattttaagttttcatgtttgatatatttgtctgagttgttaccactaataaaaataatccaaaaggtgcaaacatttttttaaagagaagttgggtgtttgacattattttcaataccttattttactatttaagaagacataaaaaaatacactttgtgattcggcctaggtttccttctgcagagttaatcgtgaacaggaggtagatttgaggggaaagtttgttgttgcttatttaaacagttcaccatgaaacactccccagacgtcgccgggaaagtgtttttgtagctggaggctgacactgggatagtcccgccaggagatcagaaaaaaatcagccaggctcagagacggtcagtttgacttacttgaaatggacacttctctgggcaacatacagacaaaaggcatctctacagctttcttggaaaacggtagcgtgtaactccctcccctttcaaaattatgatatacaaacttttatgtctgcgttatgactgagaggaaatatagtttaaattgtgattctgattagatttccatttgtggcgtttatcatgaacacgagctgtatatgttacctagccagtattttggtcatttttaattatcgtgttcaaaaacaatcatttttatttcccatatgaaaagagaaaaatgacagaaggatataggatgccagacagaacagcctgatgggatgaactggaatgccctggtatgtacactggtagagccttttgatgtgtcaggacatttcccatgactaagtatccctaatatgtgcccaccaaaggatgctaattgaagtgcagttctagctgtgatactgcttggctttgtgtagctccctatagtttataaatcacacaagatgggcctttggtatgattttcaccgtgattctaaagaagcggtacagtaggcgttgctttcttatttaaattatggttcagagagattaactgccaacccttatcagacaatgaaaaccatacaactaaatgcatatccttttttgctttggctgctagggagctcagatctgaatttaatgttcagttaaagtgattctaaccagtttaaagtatatttggccaatcattttaaaagtatgtgaaatgggtggggg

SEQ ID NO: 64414 - DNA, 1370 bp, Bovine  19866881290135
  misc_feature (1)..(1): n is a, c, g, or t
ncagcctgctggcatgagccaaaatgcgggaaaacgagaaggtacctctgaaacacgcttagaaggaaaatcattccaagtcataaaaaagatacagagaccggtagttgcctttctgagcaccaaagcatccagtgttaccttaaaaataataaaaattggaatgactttggcaagggtctcatttgaaaagaccctgatgctgggaaagattgaaggcaggagaagaagcggatgacagagggtgagatggctggatggcatcactgacttgatggacatgaatttgagtaaactccgggagctggtggtggacagggaggcctggcatgctgcagtccgtggggtcacaaaagtcggacatgaatgactgactgaactgaactggcaagtgtaaagatgcgggcatgctagcagcctcagacggactttctgaattcctgttatcattgagagaggtcccactgggaaaagggaactgatggtatgtcgaccctgtatgtgggcacccggggctctgggttggtcgcatccgtggccacacccagttgacctgctgcagaacccagcctcctaaaagggtcacaaatgacatctgctggaagtcaatgccccagcggccctggctctgtgcttctagaaatggccatgattgaattggatgaagactcacacctaagccaaaaaaaaatcaatcctacttttggccgaactagtctttattgacttagagagtaaattcgaatcacagcaggagacagaaacaaagctcctttctgacccagaaaggccccctgcatctcctggagtgcctgtcctggggtgcccgccatcctgggagcagcaccctgaagccgtggtcttcgccctggaaggcagtcttcttgctccccctctccactcggagctggaccgcctcctgctgtgggggcttctgactggttctgggactgatgctgttcccgaggcatgtcctttttacctcctgggctttgggggagcggaggcccacctgtctggtctcatctctaagtagaatcacttggttgcctcgctgccccggggccggttgacacgagacacgccaagcctgggccagggcctgtggaccagcaggagcgcctcccgcgacggccagatgggcacgtactctgctgtgttgagagggaggcgttgaattgtctcaagttcgtgccgcggggagagccccattccagctgacctgtgggggacagggaccggcagcacccactgtggtctcacatcttccttccccagcctcctgctttcctgaagaccctcaggggtgacaggaaactgagggtgaagggacggggaccgtcagcacccgctgcggtctcacatcttcc

SEQ ID NO: 64415 - DNA, 717 bp, Bovine  19866881378867
  misc_feature (1)..(1): n is a, c, g, or t
ntgaaatctaggaaccaatctgatcactgaataacccctaacctaaatctgagactgagtctggcagttaattgagtgaatagaacactgcaccttagtttattcaagaaaatagaagctgcctgctgccctggttagtagttcagatgaaataaagtttataaagtatttgatattttgtaaaccactccagtatcctctcctggaacacccccatgcacagaggagcctggtgggctgcagtccatggggtcacaaagagtcgggcacagctgagcgactaacactttcactttcaaaggaatacacaactgtaaattgtggaaatgaatgtcagtcaagctcagtgttttcagcgctaggcagtctggggtatggaactactgtactccctgggaggaaatgtgacatctagttatgtctgccaggtgaatgcaaacacgtctctgtcttattatgtgttgtggatgtgaaagtgtgtatgtagacatttttaagatgtgaattaaaaattgttttaaaactccagggttttatacggatcagctgttgccagtattgtaaaatagaatttcacatgaactgctggaagaagttaaaaacaacaaccttcaatgataaaattgacaaggtaagactaacaagattttctggattttttagtatgcttattgtatatgatttttcttccccgagaatcttcaagaaaagtcttaa

SEQ ID NO: 64416 - DNA, 1275 bp, Bovine  19866881577547
  misc_feature (1)..(1): n is a, c, g, or t
ncagctgagtggctacagcaccagctgtggaaccgggtgcctgggtttgactgcccgttctgctctggacttgagcaaccaggtgagccgtctgggcctcactgacctcacctgcgcagtgggtccgtggcagcaacggcactgcacagggcccgtcacagagacacttcggtgtacaatcttattctcagagacggcttcaaataaacgtctcccagtaatcccgatctgcttttaaattctggacctgcaagggaccttcgagacaaagaagcctggcccccccattttccagatgcggaaacttgggtcagggggatgaagacattggacagacacagccttgtttcctggcagaactgttttagaacccaggcaccctgcctcttggcaccaaggtctcccgttcttgtgctgccttgcatttcctgaaacgaggaaaaacaagttggagctgtgggactctctcctgatttcggttcttccccctgttttagcctcagaaggggaaatggactccgagccccgtggacttcacgatcacacctgacaccttgcagaacgtcaaagaggtaacgtgctccgtagtcgcggcaccagggcgactttccttccttccatccttctctctctcggctgtgctgggatttcattgctctgtgcgggctttctctggttgcgtcccactgcccccagcgttgcagcgcccaggcttctcactgcaggggctttttggggagcgcagcctggtaggcttcctagttgcagcacgcgggctctgtagttgtgaggtaccggctgggtttcaaagactcggtgtgaaaaaagagaatttaaagcatcgtgtatgattgtaatatactgattgtatgtggaagagacagtattttcaatatactgaagaatttcacctgtttcctcttactttttttaatgtggctagtagaaaattttaaattacacgttcacttcttcacatttgtggcttacctcatgtttctattggacagtgtgttctaaactctgaattgacttcagggtaactgggaccccgccgtaggaaggagtgctaggcagtgtctctagctcttcagacccattcttcccaccacagcgtcactcccccacgaccgtattcctctgtccagagagaaaaggtccctaggtgtttagtccagcatggaagaaaagttgttctcttcacaaataaagttaatctcttcttggtttttcaaaactgcataattgggaacatttttaaattattttcttttt

SEQ ID NO: 64417 - DNA, 1925 bp, Bovine  19866881969920
  misc_feature (1)..(1): n is a, c, g, or t
nccttctccctttcaatccatatttagtaaagccatactgaaaatcgggtctgtttttttttttttttttcccccttgaagtgaacctgctaattctgtccatcaacctcttgtgtcttttcaactattcgtttttgtggagctttgaatctgtgaagcgatgtctacgtccagtctcatttaatttaactgtagagaccaaatgcttcagttgggaagttggtccccgttcctgtcatattctttgctgcttagaaataagaagagtttacctatgtatccagactgtatttgtttcttgtggctgctgcaaccgtgaccacaagctgggtggcttcaacaacagaaagttgctctctcccagtcctggaggccagaaggccctcatcagggtgtgtgcaggggcgcgcatcctccgaggttctagggggcgggattttgcatctgtcagcctctggtagttcctggtattctatggctggcagactcatcattccagtctctgacttcgttttcacgtgaccgtctcctctgtgtctgtctccttctcctctggttcaaaaggacatatgtcattggatctagagcccaccctgggaatctcacctcaagatccttaattacatctcccaagaccctttttccaagtaaggagatattcacacagtctgggtatcggggcatagacatacatttgtggggagggtgggccgtgattaacccacaccactgaaggaagaacagcttgtattactaagaagctgacagcaggaagggaggcggaacatccctggtcagcgtcctgggagggtgcgggcttgcttgcatcctgtcgctggtgcggggagcacttagacatgtcctcctctgcagctttgaaatgaaaactgcagcctcggttatactcatcaactaaaaatgggatgaaatgacctaaaaatagtcctaagtaatctctggctttaaaattggcccagattcccatgttacttagaaagtgtggaaagaaaaacttggaaaactatcaactgcctaaatggtcattacctaaggattatttcagattttggctttgtttcaggaaacatattcattttgttttcaatttatattttgttgctcttcccttaccccgaccccacacccctcagtgtgagaacttggttagctcagcctcatatcagggtttcgacgagggctgagcccatgaagacaaaagtggctttcattattgagcttgacacaaggttcgtgattgcagctgacttgcacatttctttaaaattatacttttatgaaaaaccaactcttccaacgtgtaaaaattaccactcatttcttcccatgtgactgctggggatcttgtatgttcttctatgaactaacgtttctgggaaagaattaaaaaaaaacaataacaagtatcattccatttctgctgataattttgtgtgtttgaggttacagagttgtgatactggcagccaggaggtaaattaaacattaatgctctcttgattaatagatttttttttttaaactgggatttataattcaccctcaacctcttttattctgtttgggctcttcctgacatagacttggccaagatgctgtcttttgtgttgcatttttaaatgtctgtaatttgtattggagttattttgagttgtgtactaaaggtttccatttaaaaggatcataagattataaaaatttgtaaaacatagtgcgtagtttttgtaatgcttcacagaacctttataaataactttttgaacaataagcagatcaaactccagtgctgagaacatcaaggtccattcagtttgtgtacatttatcactattcagcaaacatttttgatatagttcctgactggtacttaagaaaaaagtgatgagcactttccttaaacttactgc

SEQ ID NO: 64418 - DNA, 1974 bp, Bovine  19866880195876
  misc_feature (1)..(1): n is a, c, g, or t
nggttggaaatgacgagtgtattcccttcatttgcttttgtgtgtgtgtgtgtgtgtgtgtgtgcgtgtgtgtggttttaatatttttttaatttaaatttatttattttaattggaggttaatttggttttgccatatatcaacatgaatctgccgtgggtatacacgtgttccccatcctgaaccctcctaccatctccctccccgtaccatccctctgggtcatcccagtgcaccaaccccaagcatcctgtatcccgcatcgaacctggactggcaatttgtttcttatatgatattatacatgtttcaatgccattctcccaaatcatcccaccctctccctctcccacagagtccaaaagaatgttctatacatctgtgtctcttgctgtctcacatactgggttatctttaccatctttctaaattccatatatatgcgttagtatactgtattggtgttttcctttctggcttacttcactctgtataataggctccagtttcatccacctcattagaactgattcaaatgtattctttttaatggctgagtaatactccattgtgtatatgtaccacagctttcttatccattcatctgctgatggatgtctaggttgcttccatgtcctggctattataaacagtgctgcaatgaacatttggttttttattgataaaaatatactggttctttttagaatctagattgcagaaagctttataactcttgaaatttatgctgtataaaagacacttgaaagtatatggaaagacatccaaaataaggcaaataataatgggttactattgacatacttagtttcctcccatggcagcaatgataattatctgagtcacaagctacatttttttaagtgatgattttaacattaaagccctgaaacaaggtgtttttccaacattggataaatatttaaccaaagaaaagtgagcagtttaaaaccagtcatgtccaggtaacagatagcaagggccagagtaattctttaattgaatcacataaactacaaaaccatgcatcagtcagattcctcagtttatctagagtgatgcagactttgaacaaataggaaatttaatctgttatgtaagagcaccattttgtggccattaatgaactttttatgtttcttttggcagatggagatggaaacatggatcacttgctgccaggttgtgaagacaaaaactgccagaaaagtgtcatttacttagcaagatctggagcaaagcaggtatatctacttgttttttaatgtaagtaaggttacaatcttggaaaacaatttcagaggttagaaaagtatttgaagaatcagaaaagagaaaaaacaaaataagtttacttcctcattttaacttgttgttcagtcactaagtcgtgactgactctgcgattccatggactgcaacatgatgggctttcctgtccttcactgtctcctaagtttgttcatactcatgtccattgagtcagtgatgccatccaaccacgtcaattctctcctgcccccttctcctgcactcagtctttcccagtatcagggtcttttccaatgagttggctcttagcatcaggtagccaaagtattgcagtttcagcatcattccttccaatgaatattcacgactgatttcctttaggattgactggttggatttccttgcagtccaagggactgccaaaagtcttctctagcaccacagtttgaaagcatcatttctttggcatgcagccatctttgtggtccaactcttatcatacatgactactggaaaaaccatagctttgagtatactgcccttgttggcaaagtgatgtctctactttttaatattttgtataggtttgtcatagcttttcttccaaggaacaagtctcttttaatttcaggctaaagtcaccatccccaggatttggagcccaagaaaataaaatctgt

SEQ ID NO: 64419 - DNA, 1510 bp, Bovine  19866880637654
  misc_feature (1)..(1): n is a, c, g, or t
naatggagagttgcatctttggaaattcataacttaaagggcttatagatgtatgggattgtattgaaatgtatgtattataatggaagtgataaggaaatgttttttctattttagcatgtgtatttccagctttatgttgataacaacaaaaatatataaacatgagtacattatctgatgtatgtctcacatgttttttgacaaatgtgatggaaatggtgctacttctacctatattctgggtctaatttagcaggaaatgcagttttagaaatttcgtataggaatcgttcagcattgggtcccacatgttaaaagttaaggaaaaccttgaattctgtttagactcttctgccattaattagttgtgttacttataatatttatatcttgagtatgctgtggccatccatgagtaaattttccagatgatggaaggagtcattttgacttactccccatttgagctgtcatgacatgttctactgtgtaattcagaaatcactgatttatttttattactgaactcaagagttccagggtattgatcaacatatttagtaatctacttaccgttttttttttttttcccatctatagagtattattcatcagatcctaaattaccgctttcatttttcatgatcaaatgtttcagtttcctactagaagcagtaagtgagtcttggaagtgaaaactctgaagataaagcactctgttcttctggtagttatgcatgttttactctcttgcctatctgctacaccaaatataccactgtcctaagtacatacagcgtaccacagtgatagaaggggtatatataaaaagtgtactcgtttaggattgtttactgctctgtcatttttcccaagttatttccccaacatttaattctcacaatgacccctttctatgttccttttgatcattttacagataaacataaataaaacaagagacattgagattcttttctgaaaatgatggatcattcactaagttttgtgagacagctggatataaccatttgtaaaaaagaaaaaataaagtactgtaggatcattgttgtttaggcactacgtcctgtccaactccttggtggacagaccccatggactgcagcactccaggctttcctgtccttcactgtctctcagaatttgctcagactcatgtccattgagttgatgatgccatccaaccatctcatcttctgttaccctctactcctcctgtcctcagtctttccctgcatcaggatctcttccaatgagttggctctttgcatcagatagccatagtattggagcttcaacttcagtccttccagtgaatattcaatgttgatttccttcaggaatgactgatttgatctctttgctctccaagggattctcaagagtcttctccagtaacacaattcaaaaacatgagttctttggcactcaactttcttcatggtccaacgctcacatccctacatgactacaggaaaaatcatag

SEQ ID NO: 64420 - DNA, 2055 bp, Bovine  19866880711735
  misc_feature (1)..(1): n is a, c, g, or t
nccttgactagacggacctttgttggcaaagtaatgtctctgcttttgaatatgctatctaggttggtcataactttccttccaaggagtaagcgtcttttaatttcatggctgcagtcaccatctgcagtgattttggagcccagaaaaataaagtcagccactgtttccaccgtttccccatctatttggcatgaagtgatgggaccagatgccatgatcttagttttctgaatatcgagctttaagctaagtaaagtaattagcttccaattaaaataaattaattaaaaaaacacttgatatttagtagctgcccaataaattctattttttatctttcctaaaaatgtgtgtttaacaatactgctggtttggtatttaagactgattttacaaaagcaaacatggttgcttatcattttcccttattttgacataaactcatggaagttacttgattaagaaggctagtcatgataaaatacaattggatggaatcagattaaaacagaatctaccacttgttttaatctaagtctgttcatttttgtcagtaatcattgcagctctaaagaaattgtttctgagcgtttccatagaaactcttatcagacagcaaggagcgccatcattatatacaattagaagagatatttggtttatattgggtatgttatgggttcccttcatgtaggattgaattttgaggagcacttgtaaattgtttcctgcctgatctctgatctcttcttaccatgtcctgccctgacatcttagaagatttaggaaatggaagccatatgatattatttaactatcttggcatcaatcttattgaccttaaagctcattctctttctctgtcatttgttgttcagttgttcagtggtgtccgctgcgaccctatggactgcagcatgccaggcttccctgtccttcacaatctcctggcatttgttcaaagtcatgtccattgagtcgatggtgccatccaaccatctcatcctctgttgcgcccttctcctcctgccttcagtccttcccaggatcagggtcttttccaatgagttggctctttggaactacagcttcagcatcagtccttctaatggaatattcagggttgatttcctttagaattgactggtttggtctccttgctttccaagggactctcaagagtctacttcagcaccacattttgaaagcatcaattcttcagtgctcagccttccttatggtccaattttcacatccatacattactcctggaaaaaccatagctttgactatatggacctttgttggcaaagtgatgtctctgcttttgaatatgctctctaggtcatagcttttcttccaaggcaggcatcttttaataccatagctgcggtcattgtctgcagtgattttgcaggccaagaaaataaattctgtcagtttccattttttccccatctatttgccatgaagtggtggggccagatgccatgatctttgaatgttgagttttaagccagctttttcgccttcatcaagagcctctttagttcctccttgcttcctgccattagggtggtagaatgattattgcttgcatcttggaaatgttcactgctcttctctcactcactcatgtcaaattaactgtttagtggacctctctgatgttgtggaaattctgtaatagagttggccctctgttggctctacagtctgagaaagcagaaggccgacacagccatgctgttttatttaaggggcttgagcagccacggtttttggtgtcattggcaggggtgatgtggtcctggatccaatcactggtggataccaaaggacaatcttaattctggtcttagagatactggtaaatgataaaggtcttaaagaggagcttataacctgatggaactttttgcaaagttaaaggtgacttcagtgcttttgcatgcctgtagtctctaacaagtagttgtttcctacttaactttgctacctatagccatcacctcccattgtaccacctctctacttagtctgttctacaag

SEQ ID NO: 64421 - DNA, 1687 bp, Bovine  19866880801275
  misc_feature (1)..(1): n is a, c, g, or t
nttgtttttggtaatgttttgaagggattgggcttttcttttcccccgtgctaggttgaactctgagtcaaatctgatagccccaacattctgagaatggagatttcctaaggagttgctagtttagacaaatactgatagtgttatagggatgagaattttaatggggctccaaaggtcagtcttgtccactgactgtgaggctcctagctatttatggctgctgcaccatttagtagacaggggaggtgggatggaaacagttcacgttaaaatgccccagaccctgccgtcttaagaatcaggagttcctcctggatagacagtgctcagaacattctgtggctttggttaatttccagagttctgaaatagttaatattatttagccagcattttttttttgtttgcttattggtggggggaggggacagcaggttcatgaagtccttacactggcattccaaaaatcaatctctcctattataactcacttttaaagactgttatttacttgctaggtattttcaacataattaaacaaactatttaaatgacagggttacttaatatctaaatactataatctgctatggagtctgctaaacatctactaatgttacccagaaatatgaaatcattggaaagtatatatatctaattttttatataattcttatgttagtaagagaaaggtataatgaaaaggaacagtgaatttagggataactgttaataaagtttatgtatgtaaaactataaagcaatatagttaattgcaaggggtatggaattactttgccttgtagacttagctgattgaatgaaaatgcttaaaagagtgcttcaaatatagtaaacactgttaaagtaaatgttaaatatatacatatttcattatacttagcaaagactgacttaatagacatcaaactagacttataaactgtttctctataactacctcactgaaaagaaccaaataaaaacatttatcaatactctgttaagaagatcatagaacataaattccaaataaaactgtatatttcctaagaaaacttaaaaactattaaaaagaataatgaaaataaattatcaaaaaatctcaaaatgaagacatagttacattttagcatacttttaaaaaattttagcatacttttaatcatgtaattttctgcctaggcatgtgcatgaacaagtaaacacattaacacactttattattactgcccttcactcaatgttatttcataaatattctcatgttattaacattttttaaaaatagatgtgcggagagaaagattattggaacactgaaatcccattaaaagaaaaccaaaggtaacagttaaaagacagacaatacacaagcctttaaaaattatttttataaaagtgtatctatacagatgttataagaaacataacttcattgtttacatagtatcctcttattccataatttaaaattaacattttactgatggatattaaggatttctcctaatattcattattataaacaatgctttagtgaacatctctgcatcccaatatttgtctgcatccaaattattttcttaacattcctatacacggaatactagaggatggagcatttattgggtaaatcatttcaacaaatggtgttgggacatggggatgaatacatgtaagg

SEQ ID NO: 64422 - DNA, 947 bp, Bovine  19866880866683
  misc_feature (1)..(1): n is a, c, g, or t
nttggttgctgttcatgtacaaatggcacaaagccccagagtgtacccttactgctaaaatcctgtaggacaggaatccactgtggattaagagaaaaaaattagacattatagtcattttagaaaaaaaaaaatcaccatttgtaaaacaaatgatccacaaaaaatcctcaagatatgtatcatctttcttaagttgtatctctgtaaaatggcagagtactataatttactttgataagtaggtaactgacactctaaaaaaaataagtctaccttaaaatttatcagtagtcatctttccttgaactagcatatagaaccttaaaaagtttttcacagaatatggaatcttaggattgaaatgatattatcaaacatttagttgaactgtccatttaaaaacgtgtgttggggacttccctggtggttcagtggttaataatccaccctgcaatgcggggacactggtttaatccctggtctggaaagatcccacatgccgcagggcaactaagcctgtgagccacaactactgagcctgtatgctccagaacctgtgctctgcagcaagagaagccaacacgatgagaagcccatgcaccacaactagagaagtagggcccgttttctgcaaatagagaaagactgtgtgtagcaatggagacccaacgcagctcagaaaaagataaaattaaacaaatgaataaacagaatatgtgatgagtgaaagtataaacataaatgaatattttaaatttcgtaatatctaatactgatatcctttggaaggaccagtttaggaagaaaattagaacatgaccagagtctcccttgttctgctctgcctcttatacatgatgatgagtttagtcaccatactcagaaacaagcagctctgaggctttcccaacaatactagccctgacaagccgtcccagcccagg

SEQ ID NO: 64423 - DNA, 752 bp, Bovine  19866880934661
  misc_feature (1)..(1): n is a, c, g, or t
ntttatggtgttatactatagaacagaaatcagtcttgtttaatgcaaagcatgcctggtattaatagatggcaaggatgtttatcaccctgttacttcccacctaaactctctctgctctaattgtttataaacagatagctactattccctggaagaaaagtccatggctttattattaacagtaaataatgaacacaggttcatttaagaaatgattattgtttttaaggccattatgaaattacttctaattaagcattttgatatacctgttgatttgagggtattcactttattacttttgtgtagtatcagaattttaaaatacatagttttctttgatttgtaggaatcactgagacattagtaacttaaggagatgaaagaaattatcatcaataatatggacagaacttgaaaaatcagaaaatcttagtcatgtgaaaaagttaaagatagttttttaatttaaaaaatgttaaaaaagcaacatattactattataaataatcaaaatttcatttaagtgaacaaaccttttcctgccaatgcaaaatgccaattatcgccaagatgaaaacacagacaccaatgagagcgatagcagtaagtagaacaatgttgcttggtgtaagatacagtttggcactccagctgtagatgaaaagagaagaattaaaattccacatttaacttaaaaataacaaaattctattgtgaccaaaaagcaaaagttcttattaattaat

SEQ ID NO: 64424 - DNA, 4011 bp, Bovine  19866881378610
  misc_feature (1)..(1): n is a, c, g, or t
nccttttaattgctcttcagaggcagcttgtctgggagtccatgttggactggaacatagtactgtgaaaaaatagcaaattctcactagaagtagagaagaataggacatgctacttgagactgcagttccgttcaatgagtatttgggagccaggtcctggttaggcatcaattcaaactatgaaatcaggataccttggatacactctcagagagtttctctataactttgatccaaaccaaagtactgttagtggagaaacatataataatgaaacagagaagagtaaagaccttttggaggaagctgatttatttagagccttgaccaatgggaatgcctttgacattggaatattcttcattgatggggaattatggggacatgattttgtttaaacttgctcttctttctatagttcccaatagtctacaagtgtgaccttcctgattttgacaaatgtactaaggttatattagatgttaagattggagaaatttaatgaagggtatatgtaaattttgcactgttggttttttagtgaggtaaaattcacatcacattattaaaggtaaccattattgcgtacagtttagtgatatttagaacatttacaatgttgtgcaaccatcacctggtttcaatggcttttcatctctccaaaagaaaaccctgtatccactgagcactcacgctgcctttcacatttacgcccgcacttagtaaccactaatctgctttctgtgtctagaatttttattacaggtatttcatataaacaaaatcataaaagatatgaccttttgagtttagtttctatcacatagcatgttttaaaagtccgtccatattgtaccatttatcagcactctggttgtttttatgactagatattattttcattgtatggctatgacagtttgtttatccattcatccattggtggatattcggtgctactgagatcattcatgtatcagtattggtttgaatacctctttttcaattcctacgggtatatacctagatatagaaatgcagagtcaaatggcaattcactgtctgactttttgaagaactgccaaacttttttccataactaaagcccattttgtagttccaccaccaatgtttaagagttcctatttcttttagcattttgattcatttgagttaatttttggaatatggtatgaggtaggagatctaaactcattcttttgtgtggctcaaaactttggaattaatatttttaaaagataattatcattctccacagtcttgggaaagtatcactcatgaaaatatcaagttacttttcttacacttaaagaattaaagatagtaataaatgtaagagctgaaactataaaaccctcagaaaaaagcatttggaaatggattcttatacctggtagtaaaagaaaaaagctacacaagttaaattggatgaattggatatatcaaaataaaaagattttatacagcataggacactgtcaagagactgaaaagacagtgtacagattgggagaaaatattggcaaatcatgcaccagataaagatctaggatctagtctacataaagaattcttatagctctaagcaataaattactcaatttaaaaataggcacagaatttgattagacatttctccagagagatacagctgtccagtaagcacatgaaaacatgctcaaaaataggcaaagaatttgattagacatttctccaaagatgtacaaatggccattaagcacatgaaaacatggtgaacatcactagacatcaggaaaataggaatcaaaaccataagaatctttcaggatacctataataagaggaagggatagtaataagtgtttacggtggaatggagatcttgcagcacccatacatggctagtgagaatgctggatgatgaagccactttggaaaatggtttgacagttcttcagaaagtatggagttgccatgtgactcaggaattctactcttaggtatactcagaaaaatcaaaaacatatgtgtatgtccacagaaaaacttgtacatgaatattcgtaacagcattcacttttactagcccagagaggaaacaagtcagatgccgatcaacatttacacacagtaacaaaaaaatgttttgaaattagattgtggtgatggctgcacatactacacatggtgaacatacactaaaaccactaaattgtgcacttcaaaggagtaaagtttagagtatataaaaaaactaagaataaataaaattttaaaatatctcgcttgcagaaatttttgttttaaagcagtactcatttgctgtttaccctaaggaaaaaaaaatttttttttttttttttttagaaatttatcatggcatcctgcattgaccactagaaacaaaatgcgaattccacattctcatgcattcattgatctgactgaagattttacagcaggtgagttgcacataaatgtaaaaatgtctttttggatgccaaaaactggtgagatatttgctgtgttcctagtaaacattttctgttgaattgaacattgaaaacaaaatgtgaaaagggtacaaggaagtcagtgatatcaggaaaatgtaaaaagtactggatataataaaatatacctgtagttcttttttgctgtttgttaatcatataaaaatttgaattattgactaataaatgctgtatatttaattatgagaaaaatgtttagcttatgtattaaaaattgcaaagattgattttaatttttattacaaaaaatgttgaacacagaaaagtaggcagaatagtatgatatacacatatttaatcatcacctagcttcaacaataatcagcatatggctaatcctgtttcatttgtataatcacccatgatcccctcccacctaaataaatttatcatttcaaacattttatcatttcatttataaatatttcgatctgtagtcatgtccatctgtttgcaacgacgtgggctgtagccgccaggctcctctgtccatggaattctccaggcaagaatactggagtgggtagccattctcttctacagaggatcttcttgacacagggatcaaacctggatctcctgcattgcagacagaccctttcctgtctgagccactaagacaggttgttaatttttaacaaccacaagatcattttcgaacttaaaaaaaaaaatgaacaaaattctcttaatttttgttgttcagtcactaagttctaagtcgctatgccttgagactccttacactgcagcagggcaggctcttctgtactccactgtcgtctcccagggtttggtcagattcatgtccatggagtcgatgatgccattcagccatctcattctctatcaccccctcctcttcccgccctcaatcttttccagcaccagggtcttttccagtgaatcagctctttgcatcaggtggccaaagtattggagctttagctttagcatcagtccttccaatgaatgttgaaggttgatttcctttaggattaactgatttgatctccttatagtccaagggtctctcaacagtcttcaccagaaccacagttcaacagcatcagttctttagcattcagccttctttatggtccaactctcacatccgtacaggactactgggaaaaccatagctttgactatgcagatgtttgtcggcaaagtgatgtctatgctttttaatatgctgtctagatttgtcatatctttctctccaaggagcaagagtcttttaattttgtggttgcattcaccatctgccctgattttgagcccaagaaaagaaaacctttactgcttccactttttccacttctatttgccatgaagtggtaggactggatgtgatgatattagttttttgaatgttgaatgttaagccagctgtttagctctcctttttcactctcatcaagagactctagttcctctaggatttttgctattagaggatatctgcata

SEQ ID NO: 64425 - DNA, 1532 bp, Bovine  19866880518329
  misc_feature (1)..(1): n is a, c, g, or t
ntttggactctgtgggagaaggtgagggtgggatgatttgagagaatagcattgaaacatgtatattaccatagtgtgaaacagatgatcagtccaagttcaacgcatggaacagggcactcaaagccagtgcactggatcaacccagagggatgggatggggagggagctggtaggggggttcaggacaggggggacacatgtacatctatggctgattcatgtcgatgtatggcaaaacccaccacaatattataaagtaattagcctccaattaaaattaattaatttttaaaaagaacataaagaaactactcttagctcacgggttgcataaaaataaggtgataatttaaaatgtataaccaacaggacctactgtatagcacatggacctctgctcagtgttatgtggcagcctgggtgggaggggggtttgacagagaatggatatgtgtatatgtacgactgagtcccttggctggtcacctgaacctctcaccgcattgttaatcggccataccccagtgcaaaataaaagttcaaaaggaaaaaaaaaatagtgctaggtaagccttaaaaaaaaaataaggtgataggttcaatttggcttgtgatccatagtttgccaacccctactctagagcctaaaatcaaaacctgcagaaatgaagaaacttaagtttaaggatatggaagaaaaaaaaggaagacaaaaaaaaaaaaaaaaagaatatggaagaaccaggactgtgctctactttttcctgcttactcaagttcatgggttgtaccctaacgtaaagaaatgaaaataatgaaagctacaaggaggtaatttaattatatgtgggaaaggggcattttaaagccaagagccatggctgctatgaaacattcttaattaaagccaagtcagaatgcctggcattataactccacatgccttatctataatacaatacactctttctattagtaatgttctcttccctctgccacaaaattgtatactattactaactgcaaactctgcaaatattaagctaaagggtcataggggaggaattgatgttgttcagtcgctaagtcatgcccgaccctttgcaaccccatggacggcagcatgccaggcctccctttccctatctcccagagtttgcccaattcatgtccactgggagaggaaagcactaagttaaatttttacattacaatacttgttgtcccatcttggaattagtggatttaaaagaaagatttgctctaatcttctccattaatgaaaatttatgtataatttatatctaattaatatagcattactttgaagaggtgatgattgggcttttatatcatttaacatttattgaaggtagcccatgttccagaaaatattctaggctctgagtgcatggtctgtgcgtgcacgctaagtcacttcagtcgtgtctgactctttgctattctatggaccatagcccgccaggctcctctgtgcatgggattcttcaggcaagaatactgggagt

SEQ ID NO: 64426 - DNA, 1528 bp, Bovine  19866880811772
  misc_feature (1)..(1): n is a, c, g, or t
ncaatctgatacatgagcaatgatatctcagtgtattttcaatttgcatatttttataaaggttaaagtcatctgtacttggtcagcgctgtctgtctcccattttttaattggtttattgatcattttctcattgctttgtataagcattttaggtattacagaaatgagctcttggtgatacgaactgtgaatatttttccattgattattcatcttttgtttttgttttgtggtttaaataaattttgtatctagttgaatttatcagtcttttattatggcttttggcttatgagtcacaatagaaaggtctttctcatttcaaggttttaaaagaattctcccatgttttcttgcagaacttatagttgatccatttggaatttatcctgatatgagatataaatccaacttttctagatgaaattccagatgtcccaacacctagactatttgttgaatagtccctctcttcattggtgtgagatgcgcctttcgttgtctaataaatttccatatagacttggatatatttctggattttctattctgtttcagtcattgctgtgactgtttatgtgccagaacttgatttttgtgtataggtgtgtatattttatcattccattttcccctctattagtttggaattctgtttttagtgttcactttgtatgttacaagacagtttttatttacttttttatggctgtgcagggtcttggtggcttcccgggctttttcctagttgtgccgagctggaacgactctttagttgtggagtgtgctttctggggcacgtgggctcagtagttgcgagcacaggctcagtagttgtggcgcaggcgcttagttgctctgtggcattgtgggatcttccctgctgagggactgaactcatgcctcctacattggcaggtaaattccttacccctgagacaccaaggaaaccactggacagcttttaaattcatttccccacctactgacttaggtgcctctcttgtcatgtgttttaattctctttatagtattttttaatttatgaaatatttgtttatttgtaaaacttagtaagaaatgatcatgattgttttatgtagtcagtgtttatttaaatttaacatttttattgttcctcattatatcctgtattctctgactttccatcttggaccattttcctgctgcttctagagcctcctttagtgggagtctacttgtgacaaactcactattcattttacagaatatgccattattttgagcttcatttttgaaaggtattttcgataagaatagcatcataaggttgatttgcagcacactgaagatatcatcctactgttttctggcttccattgttggtgctgagaaggccgttgtctaactattaagctttttgatgataatactgcattttgcatgataatcataattgtttatagtctgtctaataatttcaaaattagaattctagagtcaaatttcaaaataattatttctagagttgcgtgggtttcgt

SEQ ID NO: 64427 - DNA, 1050 bp, Bovine  19866880882500
  misc_feature (1)..(1): n is a, c, g, or t
naaataactccacttgacccagagcttgtccccagctgatggtaggtaggtagatagctaggatggtaggcagggatgatagaaccaatgctagtccttggtctgttgctctttgccttgaaacactcataacactgaagcttgatccagatcccgctttttgagcagctgtagaaccagcagatggaaaatatgctcagaagttgttcaatgacctttttgaagactactctaatgctcttcgtccagtagaggatacagataaagtcctgaacgtcacactccagattacactttctcagattaaggatatggtgagtaacatagtgttgactcttctgaatggttcgaatgaaactaacagtgctttctaaagggaatgtcttacctgaatttgacagaaaatgagaacagacagctctgtgtgcaagctggagggagaagggaattccagaggaggaacactttctacaaaattaattgcactaaattacctgagtctttccatgaacattaacagtcttagaacatctcaagaaagttggttacgcattacatgttccatttctatgaaatgtgtaaagtcagcaagaccataaagacagaaagaggagttaggttgccaggagctgtgagaatgatgaggaaatagtgatttactgcttgattgtcatatgatttctctttgggaatgacaaaatgttctggaagcagagaatggggatggttgcatgacattgtgaataaactggaaaccgctgaattgcacactttaaatagttaaagtggtgagtttcatgcaatatgaattttatcctaatttttaaaagatgttttaagatgacatacattgatgctcatatgtgtttagttacacaaagttatgaaacttcaaaatcttttcttctgtacattggttgatgtttgctgactttttcataaaaaaataattcatcagttgatcaattttcagagaaatttgagcagttgacccatgcatgatgatttaaatatttgtccccttgatgttccaaacactaatcaagcagg

SEQ ID NO: 64428 - DNA, 1314 bp, Bovine  19866881390958
  misc_feature (1)..(1): n is a, c, g, or t
nataaaatgattcttccaacaagtagggagaaagcaaaagaaaagcacattaatccccccaattataactcccataacaatagtttgtgtatttcttaacaggcaaaggcaactccccaaagcacttgcttaatattttttaaggaaaggaaggaaaaagagggaaagaaattaatattttaaaggtcgtaactaattattgctggtctatgatagggtagaacaaggcaatttggtttcagtcaaaatggaaactattttgaacagtttgagagaagctgagcctatcaccaaacttgagaagtggactgaaaaagggtcagagtggtaaatatgaagagatgaactaaatgacctcttcaaaaaaatttctagatcccactcctgttctaaccccaaaaaggcccagagatgatgctgaagccatggttcctggagcccagtgtatacttgcggccagggcccacccccagcatggcagcctctgtgagaacaggaacgtggtaggactgaggagtctttggcctcacagagtctgtggcacccttcccagcaaggcagctgaagctgggcacacttcaggagacatggagtcttctgggaagaagagagtcagaaaggcagcagacattcctccacccctggaggtggggaagctgagaggaccttggggagaacaaaccaagcccactccaggggctgactggtgactgtctggtagagagggtcccgagaataaggtcatatggcttctcgaagcctcagtttcctcaagtgtagatggagggtatcggtgccaaacagctgcattcactgagagggttacgtggggtaacgtagatccagcgtctagaactaggcttgttgccaagcaagttgtcagcacatggtggctgttttatgacagccattatttttttatgaaacctggaaagaaataatacagggacagcagagtggaaaaacctgcaagacaatcctctggtacataaaataaacaaaagatctctttgtatggccttttcctccttctgggtaaaaccaaggagcagagatctgattctaaagttgcagtccatactgtctaaaaggaacatactgtaaccaagatcctctgcgtgtttactgagaaaatgaggatatttaaccccatgctgcagggtgagggtcacgtgctgagagccccacccctctactgttctcttgtgatcccggaagtcagagtcctcaggctgagtgatttggggcaatgtatacacgatactgagtgggaggactctggcttgagtgaagactggaaaattccccttttta

SEQ ID NO: 64429 - DNA, 751 bp, Bovine  19866881409513
  misc_feature (1)..(1): n is a, c, g, or t
ntcccgccctttggtagcatctctttcctgctctgcttatcttgaattctgttctagtgcagtttctacagatgagcagggtagggtggtaggtaagagggcaggcttttgcaggaggcttcaaatgttggctctgccattttgttggttgtgtgacctttggcaagttactcaccatctctgggtctcaggtttttttgtttgttttttatctgtaaactggagatggcaatagtatttatcgcattgtgctgttctgagtactgaaggaatgaatctgagtagaaaacaataacagtgcctggtacaaaggaagaactatatgagcatttgctattgttattgttgtccttttttgttatgaaacaaataagggtgatatggtaggaaagggaatatttagggcgtactaaggcagaagtctagaaacttacttacacaggacctccctgcctcagagttctcacttacatctaaatcccctgctgacatttaagcctcttcccttttgttctgcccacaggagacatggagaacagctgatcaacatctcataataatcccctgaacacctgaagacagctgtgagcgcttaaagatttgctgaggctaatctgaacacaggtaattgatgatatgttcaaaggtgcataaacctgtattcggcacatgtgttgtgtattaatgggcacttcacaacttctcttcaccccttagaaactggagcgctgggtcttgtctgcacacaggg

SEQ ID NO: 64430 - DNA, 1757 bp, Bovine  19866880279714
  misc_feature (1)..(1): n is a, c, g, or t
ncatgctatagcatcactgtcggaaaaggcaatggcaccccactccagtacttttacctggaaaatccaatggacagaggagcctggtaggctgcagtccatggggttgctaagagtcggacacgactgagcgacttccctttcagttttcactttcatgcattggagaaggaaatggcaacccactccagtgttcttgcctggagaatcccagggacgggggagcctggtggctgccgtctatggggtcacacagagtcggacacgactgaagtgacttagcatagcatagcatagcatagcgtcataccttattgatctattataaagttggtgaacatttagattattttcagctgtttgctattacaaacaatgcagaaatggactcctttatgtatttcttcctttagttccagtatacaaagaaatggaattgctaaatggtaggaatataatatacctccactttaacagatattattgcctaaatgctctcagaagtagttgtaagaaatttgtgccgttactagccaatagcagcatatgaaattttgcaattgatttccatcctcaacaactggtattgttagaatttaaaattttaacaatctgttaagtatgaatatgtataatccctttgaattttaatcttcattttgcatactagatagattaagcttgtgtggtctataatttttttattgtgagcttatctatagcagggcttatgttttctgtgggaatgccgtgcaccctggtctctagaaagccattttgtctttgtgctgctaggaaggaatcccagggggttcacaggtcctaggctatgcaaatctaattttattattctctttttaaactttctacagaaagatttcagaaaatagtccagtttcattggatggatgtataagactgcatgatttggcttctgcacacttcaacttcagctagaagcttattaccttgattttatactctccttttatttctgttacgtgaaatgtctgatccatgcatcagagttcattagatctgtattcagtggagggaggagctattatgttttattcagtatttctgtgtgtgtgctttttttttttttttttttttctgggatggcagttctatgttaatgaagtctgccatgttgctagatttggaatttcagcatggaattcctttcatgagttcgtatttccctatccctctgcccctattttttatgattcatctacctttccccttatcctctaaaatccagctatgttgaactgcttgcaattctcccaaattcatatcactttgcttttgtatatgtagctaccttttcctagtcattgttaaggatcacatctgcctctacctccctggaaaaactctgagctcagaggttgggctggatggctttgctggacttccactgttatctggctctgcaactgactagatgtccatctatttcgcctactaactgtgaactcctgcaggcaatgacaatgtcttatctttcttttctttaggatggagcatagtggctgatacagagtaagtactcaattaattattttttgactaaatagatgcccagagggtgccttatttagtatatgtgaaaacatggttatgtgttaattatatgcaaggatgtatatataattgcaaacatatggttgtgtaactctggacacacatgcaagtgtgtgtgtgtctgagtatacgcatgtatgcagatatttgctctgctacttctg

SEQ ID NO: 64431 - DNA, 972 bp, Bovine  19866880404776
  misc_feature (1)..(1): n is a, c, g, or t
nagaaaagctgagttctgcctttcccaggacttgagtcttcatctttctgcacacccaggtaggtggagagaggacactttggaattctgaaacatcctcatgaagcccaggacgagtttaatgtgactttgagtaaccaatgtcaactctctcaaccttgggcatttcaaccttgggtgtgaaatgtggacaatacctctaactcactgtgtttttccaagaattaaattaggtaaattatttaaagaaactacagagaaccccacccaaagtagatgtttgaaaatgttcattccccactgtttccctttctccctcaaaaggaacattgtgacatgtttacaagtcaagcaaaagttatacatttgaggtgaagacttctgtgagtttgacaacatatgttgccatgtaactattaccacaatgaggtatagaatggagccaccacccctaaaagttccatcatgcccctttccagacaaccacttgtccctacctccagcccctacaaatactcatcctatttctgaacctatagtgctgctttttattgtgacctcttttaaaaacatatatccccaaagcaaatcattctctcaagtttttctttcacatcctacttaaaaatagctcagctctgacagctcagctttcttccaggaaaattcttcattaaaataaatgaattccatgtgcatattaaaaagacattctgcttagtattccttctatttatagtcagagttcaaccagtaggggccccacaggcctgtcagggtcctctggagctcacattctcccctccctgcccccacccagctgcagacctggctccaggcccaggtggcacaactgagtcagagtgcagaaaggggcttggggggagcttttccctatgagctgtgctcctcggctttaggtgaaaattcaggacaccctaaaattcccatgaggaatgtatagcatatagt

SEQ ID NO: 64432 - DNA, 3723 bp, Bovine  19866880518686
  misc_feature (1)..(1): n is a, c, g, or t
ntgtaaagttcttgaaaagaagcagggggatttatgactaggtgtaggactggggaaaggcttggagaatatttatgggtaacttcaaggaattccagtgactgtactttcacctgattttgtaccctcaagtttctgctttggcaatttcaagcctgcaaatgcttatggattgaaaaatattttgctttggctgtattctgttaacttctgaatttaggggtgggagagacactatatatatatttatttggacacatttatcatgctgtgtgtaagtatgtgaacatatgtttttattcttttagatttatctgtgactttcttgaggacaggacctttgctttaactatatctataccttcagacctaatataatctctggaaaataggaggctccccataaatgctctattgatgcatattgtttacttaacctttgttgagcacctttttatgctgagtcccatgctggcttctgaggagtcatgtagacagaaggagggagtggggaatttcaaaataaactatactttaaaacataaaagcatatattttaaaaggtgaagcataaagacagctacccttatgcattacggctgactcctgaacgacttggggcactgaccctctgtgcagttgaaagtccacatataacttatagtcagccctctgcacctacgcttcctccacatttgtggttctatattcatggattcaacctgcagaagatcttgttgtgtagtactgtagtattcaccattgaaaaaaaaatccgtaaaagtggccagtacagtgcaaatccatattgctcaaggatcaggtgtaatttcctttggcagccttccatagctagccctgcaggtccatgggggttcatcatttcatgtatttatctcaggtgtcttgcaaagattcagagaagccaataagtgtttattctcctttcaattgataaagaaagagattgatgtacatgtacaatacaggctgttggattggttggtcacaatggtgtaaacaccatcaatgaatcccaaaacagttttgggcacttatttccatgtaaattgtattacttaattctctgaaatgttttataggattggcagtataacacatagttttaaaatgctgttcctcttcctaaaagatctttcttccctttgctgtctgttaaatacacctgatctttcaggatccatctccagtgatatctcttctgtgattccttttcctccaatcccagccagattcataggcttcttcctttctgcttccataagaccttgcatatacatcgagcatggcactcaaacaattgaaatcctttctgcgtgttggaacatgagctcctcaaagcagcttccccatcatattcctcatcacatgaattgcacttaaatccacctggttgctcaatgtagaattttagaacttttcttgctgcattctctaccttttcattccatatcaatggccccaaagcctttgcatcttacccctagctaagctcctctcacctgtgctgcctttgcttcagttctccttaatctcatgtctcttcagactgtggcagcagcctcctaccaggtctcattgtttctagtctcatgggtcgtgtggcttccctggtcaggatagtccagtgcattcccatggcagctaagctaaaactcacagatcttcacatcacatctgggaccctgcgtggtctggcttctccccacctctccagccccatcctgtacccttgctcactgcacttgaaacagtttgacttctttgtcaaatgcttttctacctcaggctgctccctctgcctgggatgctctttctgtcactcttcaccaagtcagctgttgctcaatctttagatcttagctcaaatgttgctttcacagagtgggctttatgaagcttctggggtcctcatcagagaaatctactctttttctctatagcatcaatcagaacatgtatgcatgcatgcgtgtatatgtttgcttatgtctgtctcctccactgaaatgcagatttgttggggaagagatgtatccatttgttgctttttcactattatatgtcagaatttaaggcccgaaggtacactggacatttgctaagtatttataaaaatttaaatgaatgtatgaaaactgaattcttcatatgtgactatcacattggtactattgaatgggtcccttatttttgtttagagtgtttctccacggtaaaagtaagcaaagtatcttttgctaaatatctactggctgtcagtttcctttgagtcccaccttcctggcaccaaacagcatttggagggtgccaggagaaggcaatggcaccccactccagtactcttgtctggaaaatcccatgggtggaggagcctggtaggctgcagtccatggggtcgctatgagtccgacacgactgaacaacttgactttcacttttcactttcatgcattggagaaggaactggcaacccactccagtgttcttgcctggagaatcccagggacaggggagcctggttggctgccgtctatggagtcgcacagagttggacatgactgaagcgacttcgcagcagcagttgccccatttatgagaagcacccatccgaaaaccagagaaggcaatggcaacccactccagtactcttgcctggaaaatcccatggacggaggagcctggtaggctgcagtccatggggtcgctaagtgtcggacatgactgagcgacttcactttcacttttcactttcatgcactggagaaggaaatggcaacccactccagtgttcttctctggagaatcccaggggtggcagagcctggtgggctgccgtctatggggtcgcacagagttggacatgactgaagtgacttagcagcagcagcagcagtatcctaaaatgtccccctcttgctgtttgtctataagcagtccataccttcactcacttgcccctacaacccaagtgagaatgggtctgtttacttcagtgaggtctgttcagcaagccattttagccccatttcaggctgaggaaactgaggcaaacaaggtatgaagtgactcggctgaggtagagcaaggtcttgcacctgcctgttgaataagatagatgaaacaggcagggaaagtggagagaccaggtgtctggcccaggctggcagcaaggccactgcaggtaaccacacttaacctcctgcgcttgattcgaagtgccctggtggtctgagaagggagcccaaacacatccaccttggtgccagtagagaaattctcactctgaatatttcccaaagaacatttttattgaaagaaacacagccaaatgaaaagacacacagaggggtttcttattcatttccctgtgtgtgtgtgtgtgtgtgtgtgtgtgtgtatttttctcttttgtgttcctgagattatagttttattttgagattttagaataatttccctgtaacgcattcatcttcctgtcctaaggtagagtgactgttcacattttccagccagtcttaatgtagtagaaacaatcagaggtactgctgtgtatttaggtgctggaggagggagcagagctggagcaggtgggctgggctaataaacagagctggaaaacaggaaacaggagaggaatttccctgagttgccctatgctggagcttggccatgctctcctgtaaacctagcccagct

SEQ ID NO: 64433 - DNA, 2591 bp, Bovine  19866880563785
  misc_feature (1)..(1): n is a, c, g, or t
ntcgtgtctgactctgtgcgaccccatagacagcagcccaccaggctccaccgtccctgggattctccaggcaagaacactggagtgggttgccacttccttctccattgcatgaaagtgaaaagtgaaagtgaagttgtagcaaccccatggactgcagcccaccaggctcctccacccatgggattttccaggcaagagtactggagtggggtgccattgccttctctgaagcaaagatcatatatgtgtcttatttcactttggaagcatgagacttgggagatgtgatttgggaattagacagaactgggttccatctgggttctggacattagctatgtggtcttcaagccatgggaggcttgaacctctctgaatttcaggaggttgctgagaggtttcaagggctagggtttttgctgttttatttttatttttatggatgaagaacccagcactcagaaaagcatcacttctctagttctccactttctctgtgtgtggcagattcatgtctgtctgatttcatagacttttggcaaagaacgcttagaatgtttcaacgacttgtcaaaaataccacagccagttgcgaggacctaaacctggtcctgctggtttcctagtccttgctctttccaccatacatgctgcctctccccatcactctggttccagctgcctgtcagagaagtttccttttacaagcggtcccaagttagcagacatgtcatcgggttgacaggacaagtgcctgcttgtccttgggggcggctctgacctttgctgcatcgctccattgccgggctattttgagtcttggaaatgtaaggaagatctatggtgggaagctgtgtgaccagtgtttcagaccgctgagatcccttgagaaagtcttgactcgatgcctgctgagtgcatacaaggatcctggctttgctggacagcagagggtccccttggtcttgaggagaaaacttagaaggagaaaaacctttccatggggcattctggaatgaagtcaaatgggaagaggagctagactgggctccaggagacctcactgctgtggaacgtggaaaaggaagcgggcgtcagactgctgggcttcggggagtaagacagggtgggctcggtgctagggtggcctcctccatggggagtcaagttcctgtggaagcggacgttcacttgccctcaggatctctcagggatgtctgggtgtgttgattcagactagaaaaacacgtccttggctgcaagctcccagtggctactaactgttttccacttctccaaccagggcaggcttactgttcaaggacctcagttttacagaccgtgactgtggagggaggccagccacacaatcccttgggcctgtggatgctttggtgaggtctggggccagtgaggttctgcaccagaaaacacagtgaagtcacttaattttttcccttatagaaagatgagaagttacataaacaggatttgatcccaatcagaagcgctttgttcatgatattaatcagtcaatagacacaatgcaccatgtgttggatgtgactcctggggatgcggatctagcagtgaagaagacgtagggccttcctcaagagcatcttgtgatgcagacagaaatctaatcaggcctggtcctgcagggcctcctgtcccgacctagctcacgttgtgtttagcggtgtggtgggaaactgctgatggttcccagcaggcgggtggcaaggtctctggccactctcaagggtgagattgagtgaaacaagtctggaagcgggagagcctaagatttcagaaacattcaggagtttccaaaagtgtgtcgatacaggcaacataagcctggatgcgtgtaaccgacaatcagctttaacaatgacctatgttgatttttcactgaacatcttatgaaatgtatttacagctcttttgagcttcctgaaattctcttttggcatcactggggtcttcccattagtctagtggtatggggctcagattctactatgagattcatagtgcctttcttcccaagtaggatctgggtgaggggttctaccatcatgaaggaggggaaacttgctgtcctttccaaatctccttgagatttctcctcagctctccttactcttttctgtccctgagtttggtggcttcactgacatataacttcagggggtgaggtcgatgactgtgtgaggccttccgggcacagctaaacctgtagaaaatccccagtggtttaagctgggaggagggaaccaacatgttgttagttgggaggtgatctcagtatctgtagctggcagagagtgtggagggtcaagttcactaggaagggtgaagatgtaaatggaaaatggtccacgaagtcagaatgtcaagaatagggagcaaggtggggtgagatgggaggaagagatgagaaatcctctaggacttagttcaccacaaacaggattgtgctgtgcgccccctttctgtggttctaggtactgaaggttctgatcctgaggctcaacagacccattcaaagcattgcagccaaatatcaatttaaaaggaac

SEQ ID NO: 64434 - DNA, 1331 bp, Bovine  19866880656878
  misc_feature (1)..(1): n is a, c, g, or t
nccatgggtccctgggcctgccccctgctgagatttcctgtccagtccccaagttcctccagtagtggggctttgctctggtcagaccacctcctagaactgagtcccgtgtcaaccctaaggcctccagctggggcaggagatgagcacagagcggccccaccagtgggtgagaacagaaatatgcaaagtcacctgaaggacctggaaggactcccaggcaggagaggctgaaaacccccatgacctccgaaggaagctgagtcatgccgctggggagctggccaaccgtgaagtgaaatgaagtgaaagtcgctcagtgttgtccaactctttgggaccccatggactaaagagtccatggaattctccaggccagaatactggaatgggcagcctttcccttctccgggggatcttccccactcagggatcgaacccaggtctccctctttgcgggtggattctttaccagctgagccgtaagggaagcccaataatactggagtgggtagcctaacccttctccagcagatcttcctgacccaagaatcgaaccagggtctcctgcactgcaggcagattctttaccagctgagctatcagggaagaagcgtgaagaagctatcagggaagaagccggccaaccatattaactcacaaaaagagaaggtcagaaagtcaaactgagggactctgcctatggagaagactgagccaagcagtgcatagacttcacagccctgctggaaggaccgtccccaccacatgataaataattgagaggtcttatcaagatgtcattaaatatttcatgcatctatttctccttgtttctagttcattcatatcacacaaccttgcatacagggttgagttttcccagtaggtctgctctcagggaaagcatgaatttgttattgccaatgggagcattccatcgcggtagccttgaattagtgagttactaaagaaataactgggtttctgagacctcctccaatctcacagcagagtctacccctgagtcacagacaggctgccagaaaccccacaaagtagtctaagtctaaaagcccccagggtgatggagagttcaccaaaggggtggatgacaaattgtgagaccttttggtggccaagccacggggttcactggtaggacgtacgttttccaagaagagcactctttcctacatgtgaaattccacttcttcctgttcctcctgaagctgccacccacaggagtgcatttctgtactcccttctgtctgcccctattgagctgctggcccaccctgtccccagagacctcactggccgggggaggt

SEQ ID NO: 64435 - DNA, 1745 bp, Bovine  19866880658690
  misc_feature (1)..(1): n is a, c, g, or t
ncacctgatgcaaagaactgactcattggaaaagaccctgatgcttggaaaggttgaaggcaggagcagaaggggacaacagaggataagatggttggatggcatcactgactcgatggacatgagtttgagtaagctctgggagttgatgaagggcagggaagcttcgcatgctgcagtccatggggtcacaaagagttggatacgactgagcaacagaactgaacctgatactattagagcaaaggtgtgatagggaagcttttggcttcagataaaaataaatattgactacagaatggctaaggaagatagactagaaagagatgattttgcataaccaaggaaataaagatttgtactgtccccaggataagtaaccggtgttagacattttagaggatgtctctgtatggtgcataatctcctaaagaacaattgataccagtttggttctaaagtttcaagcaattgtatatggtcagggaaattagaagtctgcttaagtagtaataacacccgagatatcaaaagtgacactttggcataataaagtgccagagaagttgggcaatgcaattcagagcaggctagatgatggacccattggctctaagtcaggtagtttttaaaagcaattcaattattactattgtttgtaaaatgtcattcgtaattgttcttaaattaaccacatagaaaacaatatatgggtctatttgataatgtaatttggttactctccaagaaatccactttaaggaataatactaggactgtcactgataaataaaccacatttgattgttctaataaagttggaggacaaaaatcacttgaacagctttccttatggaatgtcatttaacatggcctatttatgtctgaatctattcactggtattggcttgtgttttaaggaatcttaatttaataaagtcaaacccaaccaaaatgagaatgttatataaaattccccaaatttcatcaagttctcatcccacagattgtcctggtttatttcctgctgttagtgcctctgagagttcttctcaaaataaccatggctatttgtattttctatggttaaattgggtgagggaagggagagggagatgatttgtttaaaatttttgcacagaaatgtgccccagatttaataagcatcagagttctgattgctgagtggtctactccatttgaaaaagtcaccttttcataatttttcttgctaattatatgagaaattttaatttccttttcattcattgattcattcaaactttaatacttgaaatacttattgagaatctattagagggcacatattaacaatatgaggagaagggaattgcaccccactccagtactcttgcctggaaaatcccatggatggagaggcctggtaggctgcagtccatggggtcattaagagtcagactgagcaacttcactttcacttttcactttcatgcattggagagggaaatgacaacccactccagtattcttgcctggagaatcccagggacgggggagcctggtgagctgccgtctatggggtcgcacagagtcggacacgattgaagcaacttagcagcagcagcagcagcaataacaatatgatgctaatatgacataaagaaaagtcatcattgagtcaataaatcagaacacaaggaaataacacaatgttaatttattgaacacagaaaaataatgtgaagcagaaagcataaaaagat

SEQ ID NO: 64436 - DNA, 1610 bp, Bovine  19866880758238
  misc_feature (1)..(1): n is a, c, g, or t
ngagcgcataattgctttgttctagggtccattccatggcatgaaaaacagcaacaatctgtaacaaacagcgtaacttccctgtagtgtccctgcccagggaccttcagacccataacaaaacagtgtgggctaggttctttcagccatgtgatcctggttctttggtattgcccaatctggcttgggagacatttccacacattcatcatgaatgttcttgctttctcttctgctgttattcatctaataccttcctaaagacccccacttcgtttcgaaaaatccacacttctcagccttaaagccattttgttgttgctgacactagtccattgctcagaccctaatgcctcattttttcttgttatgtaggagattttcttacaatgctggaagatgccctaggagataaaaagctcaaaaggatctagtttctattaaaagcaagtctataggattagaagcttcttaatgcacaattatgaaatgtatatcaccaaatgtagtcacccatatcttctttcttattcctcctttccagttattactctgcttaatgtttccacagggaagagcagcttctgaatctttaaggaaactctcagttgatgtgtctgaagtataatcacgataccatcccacatgtctacatctctttgagggatatatcacatcctataaaccagctctgcaaagcctcattaatgacacagagcattggaggatattaaaagggaccctgcctggcagatagaacaaagtatctgtcggccatggtgactcatggtatatccatccaagctagggggggtgtttcagaggtcactaaagtgagcacactaacacttaaacccataaagttgataaaatagtggataacaatgcaaaatctcatatgctaggaggacttcaaggttagggactgggcttgagtcctagcagtggttcttcaactattaagagttgaaatatgctccatgaatgttctacaacattgtagaaatttcagaaagagaaacaagacagcaacatccagtctaatatcatagcttccttatctttattttgataataacacatcttattatgcttgtaaactcacaggagacattgaataatatttacctaatttttcttagggaaaaaacctaataatgtatgataaacctgaattcagtttaaattttatttgttcatcctgtgcctcacactagagatgtgtttctcaaagtcattttaatcttaattagcttagtattctcagcacctagcacaagaatttctatgtagtagacactaactaaatgcagcctttgttgaatgaatgttgaaaaagaaaccatttgtgacctcagcacttaacacaatgatctagtgtgcaaacattttttgagtagctgaattaagtatacaaaatattgcacaactcagagatctgactacaaaacatagtaagattgagtcttcatgttacatagataagagtgggtctaactacaacaaagggagggaagtagaattttaacttggggaggaatcgggtagactacacacaattacagctactaaaagcaaaacctgggcatggggattcttttctcctcagt

SEQ ID NO: 64437 - DNA, 925 bp, Bovine  19866880820339
  misc_feature (1)..(1): n is a, c, g, or t
ntagtgttgggagtagggagagagaaagcttctcctgaaagaattttgatgctacacaacacccttgttatcaaaaggttatatgaacaaattcagcatcagcaaaagcaaaatctgtttctctcaatagtaattttaagattgtctaggaagaatcatttaaaactatctctgcttgccatagcttgtaaaaaattcttctgtaaaattgtaatcctcttattgatgttttgtttttcaatttctctatgtaatatgtaattatttcaacctcttcccctttgtgtggtctattggtgggctagaattcagaagagtttctttctaagaactccaataggctcaagatagtgatctttcccctcaactcatattctctgacctaaatagttttattttttgaatgtgccccaaagatttgaatgggacaaagtattcaaaacatagcattcgcataaaatatttaatctcaaaaagaagcaggctttattccctcaaggaaaaagaaatctaatgccaaaatatgaattgtctttcatttctctgtttcttttctttcttttttttttgaaactgtttatatctagaaaaaggaataggatggccagagccattatatgaataattcgattctagtatgcttgaccaaaagattgaatgaccaaagcaaaactgaagatgttttaaaatatttttcacatttatttatttacagctgtgctgggtctttgttgctgtgtgtgtgctttctagtttcagcaaaaagttgctcctctcttgttgtggtgtaagggcttctcagtgcatgttgccttctcttgctgcagagcatgggctctagtgtgtggaggcttcagtagctgagactcacaggctccagagcacaggctcattatggtggcacatgggctcacccatcccatgg

SEQ ID NO: 64438 - DNA, 662 bp, Bovine  19866880848154
  misc_feature (1)..(1): n is a, c, g, or t
ntatttgccacataaaatatgggtcactctctctttctgctcagaactgtaggccacgcctttcaaaatgcagtgaaaattttagaatatttgaaactggccctatatatatccttctaggtattcctaaagtaagcaaagaaggaaggagacccatataacagttgtataagatggtgtccagattcttgctaagaatacagaacaaatagccaccgcctttactcccacaccactcacctcaccccctttaaaaacaccaatggggtgatgcaattagctgaataaaaacacaacatatgaaaaactattagggtaatggatctctcactatctcaaatatagtgatggtttcacaggtatatatacatgtcaaaatgtgttaatttgtacactttaaatacatgcaatttacttcctgacaattatatctccttggaaggaaagttatgaccaacctagatagcatgttcaaaagcagaaacattcctttgccaacaaaggtccatctagtcaaggctatggtttttcctgtggtcatgtatggatgtgagagttggactgtgaagaaagctgagcaccgaagaattgatgcttttgaactgtggtatggagaagattcttgagagtcccttggactgcaaggagatccaaccagttca

SEQ ID NO: 64439 - DNA, 1497 bp, Bovine  19866880901851
  misc_feature (1)..(1): n is a, c, g, or t
naaaaactaattttttttgtatttatttcttcacagatttcaagttgttttagggagtaaagcagatatgttccttgttgttccattatgttctagaaaaagaggtaatttgcacatcagttatactttttcaaaaagtttatttaaaaaaaaataatgttgctataaattgatcagattctgagtatttgctagtggcagatactttgggggaattcttattccctttaattatggtttagacttctgctttgactctagaacttgagttgaaagcctctaagtaaacattagggtttattatcggagaaggcaatggcaacccactccagtactcttgcctggaaacccccatggatatacttttgactaatttgtcatgaagaaagaaatttgggggtaagtatgatgagtttaattttggactaaatttttacattttctctttcatgtcaagtgaagatatttagaaatcagatctatggtttcttgtgctcaagagtattgtgaactgcagctagaaacttaagaattaccaatgaagagttagagactgaatcagtaaatatgcatagcttgtcaagaagaatcacagaagagggtgtaggctggcatcccaccatggacactgactagctgagaggcagaggataaagaacttacaaaggagtgaaacctagaaaaatattatcagagctaaattcaatgcaagttttctcaaagaaagtaacatttggatgaataaaaagtactgtaacctcatttaatattagtaataccctatgaagtacagtgtttcataaccatttatggctattcttatcttccctcccactatttttcttccctcaagcagggggtaaatattcagccctgtagactgaggatgagaagctctccctgagtggaatattgcttgagatcatgtaatagggaccttctgaatctaattgactttgaaaattttatacaacacagattgtataataaaatagcagtaaaaactaatcagaaaactttgtgaggtgctctgccacacacactgttaaggccaaaataactattccgtgttttttccatggcttttataaagaaattcttggaaaatattgcaaactggctctgggctcctcacttatataactcatatttttatttcatttctctccatctgaggttggataactctgaggttagaattgtattgctctttatgtggtaagatggtttagtttttgaaattgcgctttactcatggctttggcagctagtgggttctagccttccttgaataatgaatctacagaaaggaattagactgatctttcatttgatcccaacacttcccaatagatgctgttttatatgaaagtgttaacactcaaaacaaagccaaattcagtcttctttggaagactataattgaaagatgtagaattttatgggcaaaataagttccttctttaaaaacattctttatggcagaaaaaggagata

SEQ ID NO: 64440 - DNA, 1643 bp, Bovine  19866880976306
  misc_feature (1)..(1): n is a, c, g, or t
nagagggactgggggaggggtgaaatagggatatgtgattaaaagacataagctactattataaaataaataagcaacaagaatatattgtaaagcacagggaaataggatatagccattgttttgtaataattttaaaaggagtataatctataaaaatactgaatcagtaatactgcacacctgaaactaatataatattgtaaatgaacaatacttcaatttttaaaaaaaatagaaggtggtgatggctgcataacaatgtgaatatgctttatgccactgaactatacactttaaaatggttaaaatggtaaattttgttatgcatattttaccacagtattttttttttatcttttataaactcacatagtaatcacagaccagaaaaagaaataaattgttacctcatggaacaggagattagaagatcacgagagggaagatgggagatttttgctttgtattttgtaattttctgtactgtttggattctttaacctatgcacatattattttcatattttaaaataaaatatttttaaaaagtgagtatgcaaagggagtatttcagtccatgtttctgcttgacttgcattcaatttctcaaacactattttatagaagctgatttccaagaaaccttcaaagcccctttttattattatttttactagaagccattcccttggaatcagacactcatgtttttccgatggagcttgcatttgaagcctaggagggtgaatgtgtttggaagcctactcagcacagccctctgcctttgaactgcaatgttttcctgggctcctcacatatccctcctccaattggcttcccatccagcacatccatcaagcagccagaatttatcgagttacccgtggaagtagccagcacctgctagagcatgcccatttaaaaaaggcttccaccagcaaagcagacctcaggaaaatccctgactacagctgctcatcacccatgctccaatcaacaggctacatgacgccaacatgaaggccaacaagaaaggccagctcatcttatagaatttaccagaaattgtagattccagttggagaattttagcatgtttgagctgcaagagacctcagaagtcttattaatattataaaaccattgcattggatagagaaggaaacaaagcctaaacatgcccaatcacaggcaataagttggaagcacagcccaggcccaaagtagacatagatatatcaggagacacgtcacactctagatgagtcttaagggagctcccaggatggtggcgtctcctgtgggggaggttgaggaacaggtggtggcagggggtcaggatggagtgaagaagcaggaaaggaacacatcagttaccttggcagagagagtaatagcgtgctaagtaagcctgaattctttgatgggcaatgaagtcattcacttgatggactgtttctctgttggttcttactttttaattcatttatgtgccacaccttactctatatgctatgttggatataaacttgaatcagacatgccccccatcctcaaggccaggtggtccccatggctgctaatagagacaactgcaatacagtgtgatgagcaggagaaaaagcactatttcctcaatt

SEQ ID NO: 64441 - DNA, 773 bp, Bovine  19866881007349
  misc_feature (1)..(1): n is a, c, g, or t
ntgagtaacatgatgtgagcttaattcttttggaaaaacatgaaaaatggaatcttatcttttaaatggctgcttatcacatttttttcccccactaatgaaattcctatatggatgaaaccaatttgtaaagttaaactggggattcgggcactttggaggtggactaagagactctgagtgagctaaacagtcattctgagcctctcttttctctactgggagatgagggatagcagtgcttatatgattttaaaatgaccactcagggtcattagagggctcaatgcaaaaatggatgcaaagtgtcttctacattgttggcgcacatcagcagtggctattatcattggccagatatttttcacggtcttccttagtcttgacattcagtagctcacctttcacttctattttaccttttcctcatcttggtgaggtggcaatggggcttggtgttgaacttggaggtaggggaggaagtgtctttcaagcttaagaggagagcacgaaccaagacagaggtcctgtgtcatttggttggagtgtgtgtcaaggaggttcgggttgtgggaactccagaggttggacttagggacgtcatcttgtcctgtgtggtggggaaccattgacaaaccttgagcgtggccatgacatgctcatgcccaggaagtaaacaggtggatatatgtaagaggcacagaaggccaggagaccaatttggaggctgctgcctggtccaagcagaagagattgtgggccttcactttttg

SEQ ID NO: 64442 - DNA, 1506 bp, Bovine  19866881012180
  misc_feature (1)..(1): n is a, c, g, or t
nccgccttacacccctcagaggaaggacagggatattattctgccctgggcctggggggagaaggaggtcaagagaggtggaataccagtggttaccaaagtcaaggggagaagagatcagattgcacctgagtgaactcagagggctttattatggaggaaatcctgctggcaagtccggacaagacttctcttgtgggtttctgaatcagagacgagagagcaaaggcaatttttgtcacttaacaatgataacagctatcactcattgagtacttactgtgtagtgggtagtgtgctatgcctttacattttttcgtttaatttcacgaaggagatgtaagttggataatgacaatgtattgagaattcatgccatgcaggtatttaacatgtcttgcctttttaggtcttcacagcaacctcaaaaagtatgtgatttctatatgacagaagggaattaaaaaatcatggtcactttgtcgggtggtgttcagttgctaagtgaggtccaactctttgtgactccatggactcagtatgccaggcttccctctccttcactatctcctggagtttgctcaaattcatgtccattgattcagtgatgctatctaaccatctcatcctctgcttccttcttctccttttgtttcaatatttcacaacatcagggtcttttccaatgagttggctctttgcatgaggtgatgagagtattatataacaaaactgagatttgaatctaagacttatctgcctccagaggttatgctctctccatttagatctactggcatattattgcatccctctgaacctcagtttccccagttgtaaaatgggactaataatagctacataatgaggtataatgaggattctcggtgataatatccctggtaattcataaagatgttttagcaagatcacgagctttcaggcaacaaagtcttaagtctgaatagtatcttaatatttaagaactgtaatatcttacattagttatctaaacctcaacttcctaatttgtaaaatgggatgataatatctaccttacagatttcagttaagattaaatgaaaggatgtttgtgaaatgcctacttcaggagcttggcacatagcagtgtttactacaattggttttctcccttttcccctcctgtatcccactttcttcctgttaaactgtctctcaaccaataacaccattgtcttctcaaatgctaagtagaatcttagagttcttttatagacattcttattcttgtcattcacatttaacaactatcaatcatattcagtgcattatatcaggaatagaactttttcaagcaccacttgttaaagagattgtctttaatccattgtatatccttgcctcctttgtcaaagataaaggtgttcatatggtgcgtggatttatctctgggctttctattttgtttcattgatcaataatttctgtctttgtgccagtaccatactgtcttgatgactgtgg

SEQ ID NO: 64443 - DNA, 945 bp, Bovine  19866881015183
  misc_feature (1)..(1): n is a, c, g, or t
ntcatttgtgtttcattacatgatttgcatacgggtgaaacaggtctgtactgtcctctggcttcatttccattgctcttgggagctctctgctaggcgtgagaaggaggcttttgtccttcctctgtccctgcccactctcttcctggaagtctgtctagatcgctgacatccacagggagaaactttttttcccttctcccatctcctccatagctcatacttgactctggttcacagagctggtgagtctacatggtacagaactgggaagttattcaactatattcaggacaaagaggagttattagttgacttttctcctccttgagaaggaaagaggtcttgctctctgtcactatcagggggagaaaaagaaattaccagtttgctcagcatttagacactgagcaaggggccttaaattacattccctacaattgttacaaccattctggtaggtagacaccattgtgcccattttacagttgaagagatcaaggccaaagaggccatgccacctgctcaaggtaacagtggatcatgattgacactgagtaagagcggcctcttttaggtccatgctctaaccacagaaccacctggctttccttagggaataagtgctctgcaagccaagtattggtcttctgtattggatttctgtctctggagaagcaatctgaggggactacacagatgtcatggactaaaggacaaactgaatgggacatttagaacttcaggctcctctagctcacctgtcacacctcttaagtgtgcatgtctgaaaacacagatgtatagctttcgtaagagctagagtagaggagtctctgacctgatcttaagttcagcagagcctgtgaattgactcagcatgcctcagagccctctcctctgacctccaaaccctcagtccaccccaatcagagaactcagcca

SEQ ID NO: 64444 - DNA, 2551 bp, Bovine  19866881113922
  misc_feature (1)..(1): n is a, c, g, or t
ngaagtacatttgttaaggattgtagaaggtctaagactttcttcaacctccaaacgaatatacaggttactctgctgcagtttcatggatgctgacgaaagtcataagacccctgggtcagagacaaaggatgccattactcaaagtacaataaatagcatgatcttttgttttcattagctctgcttgactcctaaatccgttgagggtgatgtggcatgacccagatggtttgcttcacagctgagaaatcctgagccaggaaacctttatattttatattggacagcaaacaaacctgctctcctctctagaaagagacactctattttctcagattgtttactacataaatatccttgataatttagttcagaacaaaagatgtcagctcctctgctcaaaagatgtacagaaatgggagagactcatggacaactgtctcccctccaaacactgagtaactgtgcttccttttggaaaagaacaaacagacctataggcatttttaccagggtctcagaaagtggtcacatgggcttcctttgtggctcagctggtaaagaatccacctgcaatgcaggagacctggctttgatccctgggttgggaagttcccctggagaagggaacggctacccacttcagtgttctggcctggagaattccatgagctgtataatccatggggttgcaaagagtcggacgtgactgagcgacttccactttcagaaattagtcaactcagttaatttcataactccctctggtttcttaagactctgttgccactatgtttaagcttctgtagggctttccagcatataaatcctatattaatgcttttttccttctaaataggcagcatgagattccagccactgtttcaggtctgagtgttaattgtatctcagagcaatcagctcctgaaccagtgttttttcttgtgtacatagagaaaaatgatcttctccatatatttggaatggtgggcagcaacaagctttctcttagaaagagcagaggtatgtctgtggaagtacactgtgcccttcaaccatgccccagccccatttttgtctcttttctgctttttacaatggaagcttttagaatgtcacatctgtttccaatcacttccctttggtcttcactgtatgatcaacctcagcaacctgatttgtaaagggatccagactattttgcaagacaaccaacatatgttaaagaaaattgcccttttaatatccaattgcaaaacaaacaaacaaacatacaagaaatgttatctttagtgtttacactcaagacacaaagaatgaactgctcttttatgacaaagggtttactgcttgacttaaccacaaagatgtctaaagcaatatattatgccttttaaaaagaaaatatttttaaaattttgaaacactttatgcagagaaaataatctggcaaatacttattatctctcacaatgtttaaacacacatcttaacattttgacatatctgtttcagctctctctaagacaaacaaaaaagaaaaaaggaaagaaacatagctaaatccaacgctcttccttcctttttctaaaggtgtaacttctattgtgtatgttttaaaaataatcataattgatatattggcagtatgctagaggctttttacattcaacattatattttaggcatttatctctaaagatatatttaatctaatttatttattcattttaagtgatttaatattgtgttaaattgaactcttatcagattttctgggtttaaaatctgaacaccactattaactaagcacatgaaattgggcaatttatgtaatcttcaatttatatatcttcatttcctatatgtcatatgagaataacaatatcaatatcacttaattgtagtaaagattaaggaggtcatgaagttagtctatagaatggtattttagttccagagctgccataacaaaatactaaaaactatgtgcttaaacagtggaagtttattttctcacaattatggaagctggagagccttccaggtggctcaagtggtaaagaatccacctgccaatgcaggagatgcaggcaggagacatgggttttatccctaggttgggaagttaccccagagaaagaaatggcaacccactccagtactcttgcctggaaaattctatgggcagaggaacctagtgggctacaatccatggggtcacaaagaatcagccatgacttagcaactgagcacccacacatggaagctggaagtccaagaccaaggcgccggtaggtttggtttcttctgaggcaggaggctgtctttttgtgttgtcacatggtcttttctctgtgctcgtgtgttcctggtgtctcttcgtgtccaactttcttcttcctatagggacaccagtcagataagattaaggtccaaacttaacttagaccttgggcttccctggtggctcagatggtaaagaatccacctgtgatgtgggagatctgggttcgatccctggctggaaagatcccctggagacggg

SEQ ID NO: 64445 - DNA, 2587 bp, Bovine  19866881123357
  misc_feature (1)..(1): n is a, c, g, or t
nccagtctggcaagtttcttgtcacactaaatggtccccaaccttgtcactcactagaatctatcagctttgaaaagagatggctttttctctcttcttcatgcaagaagatgccaaaaacatttatttttgagcttggtcaaagagtccagcctactaagaggtatcagatgagaaaatgtttggactgttagtagaagcaatgaacaacttttataaattggagaaatgaagtcttagtttggttaaaagtacactggataccttatttcctattcaataaatggagcattttcatgggaataagccaaagcttttgtgaatagctccttactttttcccatctgttagaaacatttttcaaatataaattaaaaaataaatccctccaggaatttgtatgttctcctcctttactgttgggagttctatatcatgagtttatgtcatgaatcttagctgagtttatatttgataacgtccttagaatagagtcaatcatcaaataaaaacaaatctttcttgttttcaatcttactgtattgcaaatatttctcaacatccagcaaagaattttgagatttcaaatgttaactatttttaatcactttactattcctgacatgatatgtcaaagttccaaagttaaagtcttcttctgaatgttcatgacaaatctgatatttcatggggcaagctggctttgctgtgtgaatttggataattcatttagtctctaaactcttatcacattttaacttatgagggaaaaagaacaaggtcacttgaactgagaaatcacatccctaaaaaaaaaaaaaaaaagaaatcacatccctttgagtcctcaaaagttttgtcatgagcaattaagttttctgtagatatacatttgtaaaaatcatgaggaaattctgtttccttttgtgcagttacactaaaataattctttacactctcgtcacgtacatagtctatctaaactagctacagaattggaatgttatagtttggggaaactatagaaatgatatctgtattatttctggatgacttgcaaagataggaattttatgaacttcacttgaaaatactttcaagtgaagttaaatcatgaaaagtacacagtttagccaagtgaatttagcaatacttttttttttttcaggacttgatatcattatctctttttttcacttaaaaatttaattgtggcaaaataaacacaacataaaatttaccatcttaatcatttttaagtgtaccattcagtaaggttaaatatattcacactgttgtgcaactaatctccaaaatttttcatcctgcaaaactgaaagagatttaaaggtttattatttgtgttgaatggtaatagaaaccagttggcattctgctatttccatttttgcttctttaaaaattatcatcagctttctcatttctttatgttgtctgctatttactatgaaggcactgcattacacaacctgtttgaaatctttttatctgttctagtatggtaatcgtccacctgacaggctcataactacataatgtgaaggttatgaggttttcccaataagcaaatcacacaagaaataagtgtggcaagaacttggttcaggaattgattttcattgatagtatagtgaatactctaaacttatatcctgatagtgtaaaaacttcaccagatctctttctccttcacacacaaacacattcacacacagccaggtgcacacatgtatatgcacaaagtttgtcggcaaggaaacacttgagatatatcaaaccaagcatgttcaacttattttatttaaactaacctccttgagagaaggaaaaataaaaagtcccaggtaggcaaagaaaacggggagcagaaaaaaaattatgttagttctacaatgttataaaatacaaataatttcacattaaaaaaaagaaacaatagaacaacatagtctgggttatgtatgcatgaattcatttcgtcattcaacaaacagtcattgagtgcttactctatgccagggaatttagtagtatacaaagataatcaataatgctctgtcttagaaatgaacaatcagaaagcagagtgatgagcgacatgataaaggaaagccaggtactaaggaagccgcaaagaggaaagaatgtgtttcattttgtacttttatagatttaattagttattggacttttttctctcaccttccactctggctcccaaacaataatgtctctggtaagtagctgttcaaagagatattaaacttactcacatttgtgatggtattttagtatttacctctttttgtagctcagggatatgatttaactttataatctgtagtcatgatagagtgtgttaatattattgtatctctccagttccccttcccctacaatgggaggaatgtacttccccaggaacttgctttggccaaaggaacgtgggcaaatgtgacccacaccccatttttgcagaggtattaaatatacttgcatagtttggcaaggcctcttgaatttcttacctctgccaaaagaagagttgtcctcagatatccctaga

SEQ ID NO: 64446 - DNA, 2176 bp, Bovine  19866881218561
  misc_feature (1)..(1): n is a, c, g, or t
nccagcgtaatatatttgtgttagatgtatagaagaatcatttttcaagagataaaataaaccctcctgcaatgtcctgtattctctctttaatattatccatgcttctgttaatatgttatcagtttttacagttctggcccatatacgcctgacttctttgcccccattcacttattggttaaaccactcataagatgcttatcatttgttttcttgtatcagtagcctccccttgagaggtagtgtgataatctcgaggtccatcatgttgccccaagtggcgttatttcattcttttttatggctgagtaatattgcgtgtgtgtgtgtgtgtgtttcacatcttgtgtatttattcttctgtcagtggtcacttaggttgcttccataccctggccattgtaaataatgctgctatgaacactggagtgcaggtatctttttaaataagcatttttgtcttttctgatataaggccaggacaggaattgctggatcacacggtagttctatttttagtttttatcaggaacctccacactgttttccatagtggctgcaccaatctacatacccaccaacagtgtaagaggattcccttttctctacaccctctccatcatttatcatttgcagacctaaaattttttatttctttatttttttggctgccctgggtcttcactgctgcatgtaggcttgctgtagttacagagagtgggggctactctctagatgcaatgcacggacttctctttgcagtgacttctctttttaagaagcacaggctcgaggcacaagggctgtagtacttgtggctcgaggactccagatgtggcacaggggttacgttgccctgaggcatgtgggatcttccgggatcggggatcaaaccagcatcccctgcatgacaagccagattcttaaccactggatcaccagtgaagtccctgtagactttgatgatggtcattctgatcagtgtgaggttgatacttcaacgtggttttgatttgcatttctctaataattatatgttgagcatcttttcatgtgactgttggctatctgtgtgtcttgtgtggagaaatacaaagaatattcttctttggagaattctgtttagatcttctgcacattttttttggctgggttgttgggttttattttttttttcctatactgagttgtttatatattttggaaactaagcccttgtcgattgcattgtttacaaatactttctcccaatccttagggtatttttttgttttgttgataaatgctaatcattattattgtaaatttaattttctaaattttatatttctctttatttttagctacagataagcacataggaaactcatccacccatttttttaaccatccagtttatttccctagtacctaacatgtctgcaactggtgcgatttcgtgtgggtgtgggggaaaataaaatgtcaagcagttttatatgttatgcttgtaacccgctctatctttctgtgaggtagatagcagatacgaaaactgaggctctgaggatttaaataacttgctcgagatcacccagctgttaagtgtaaattaaatccatgtttgtttgactctttccattgtactgctggaaataaatgtgaataaatggatgagtgaatttgagaaggatctggaattgtattttgagctcctcctgtgtttatttaccactgtattcccagaacttcccacagtgactacttcatcggaagagctcaataaatatttattgttaaatgaatgaataaataaatgaagaaaaggacaaaggaacaaatcaaggaatgaatcggcaaaatgactgctcaaaaagtaattttcagccttcctatccagtctcctacatacagtatatgacatatttatgataaatgctcccattcggtacctagagaaagcggaggaagtaatacattaccaatttgctacacgtatgatttcagaccaatagtacacaatcacctttgattttattttatgaaatgaggaggtaatatgtctccagctgtgcaaccagaagcttcatttgtttggctatgggttcacttggaatgggcaaaggaattcaaataaaactgtatggtgtatcccaaacatatttttcctttctggttcaaggaactttgggaa

SEQ ID NO: 64447 - DNA, 1617 bp, Bovine  19866881359940
  misc_feature (1)..(1): n is a, c, g, or t
naaccctgattaattgactgtaatgtccccacggtgctcccctatgatttagagcatccttatcttgccttcctcttcctccccagatcccacctagagtgccctggcagggtctaattcactgcttcatcctcagcatggaccagtatctgacttatgctgggcatagtagattaggaatgagcattttctttagacatgcaaaaattgacttctatcttgtaatatacaagttgctttctatcattcctttgatgtaggagaacaactcagggctttggaaccaggtgtgtgtatgtgtgtgtgtgtgtgtgtgtgtgtgtgtgtgtgtgtgcgcgcgcgctcggctgtatctctttgtgacagtatggactatagcccaccaggctcttctgtccaaggggttttccagggaagaatactggagtgggttgccatttccttctcccagggagatcttcccgacccagggatcaaacccacatctcttgcatctcctgcgttggcagacagactctttaccactgcatcacctgggaagtccttggaaccaggcagatctggcttcaagtcccaacatgtttacttctcagttacaaccttgggcattacttagttagacctcctgaccctcagcccttccttgtgttagaatggtgatagtggtgccattcccacagaaagagtgactgttaggattgaacacaatggagaacaaagcactcaggactgcgctgagcacagggagcgctcaggaaatgttagtggttaggcaagagtgttattattcgagtagtttataacatctctcagcaacgtgcttagattttctttggctctgagtatgccatcctattgtttgggagtttaattcctcaccttgaccaatgctcaactcttttgccactttccacgtttgcttgttttgctgttgctggtattatctatttagaattgtggttttgtaaaccatttcttaaaatgctcctgtcctttaagagatagtatatcggggagagaacagcaggcagaagggagtaggggaggatgggaacagggctggaatctatttctcggcaaagccactcggccactctgggacttcttcccacatgtgccaattgagaagtaatggcaaaagtgagatcccttagtgcttaaatgcgctgtgtgtataaaccctctgctcttcaatcctgggacagtagatgctcttcagcagagagatgtacgttaagggcatctctccctgccctccctccagaacacacacaccactcgcaaatgcccagaggaaacctgcagttctgttgtttgaacatgttgttttccttaaccaagtggttgtttgcaaatgttttctgattgtaacagcagtgaggccgcctctcctagaggagattgagttctttctctttgaaagatactgtttactgaaataaattccacctcctccttggtttggcttttcctctgtaagcaatcaaagccaactggcagaaccggcaagcttgctcagtccattgcggcatctggctttcttttctttttctaagttgaagtgcaggctgtgttgtgagcctcacatttctttgcaaaggcaattagttttgtaag

SEQ ID NO: 64448 - DNA, 1387 bp, Bovine  19866881399391
  misc_feature (1)..(1): n is a, c, g, or t
natatgtttttctggaactctcttgcttttttgatgatccagcggcatgttggcaatttgatcctagataagaccccatcaaacagataaaataaatacaaggtggaatacatattttgatggctcacatttttttaaaaaaagagacagtgcgattgacacaccaatttctgaaagatggaaagcaaatggggtcaccgaagcatgaattgaagcataaagggtcagtccaaaacccagagagaagactacagtgagtgtgtgacctgatataacctgatggagcaggtttggggacaaaagagagggctatgggataaccataatgaggcaatcaagactagcctggggagggcctataatctggatggtggcaggggatggaggcaaagaagagttcaaagtaaattcatacttccaccttgaccagaagaaaaggaggaaaaatgcttctactcagagggaaaaaatgaaagtactgcagtgaactctttcattgtaggaactgtagatgttcaagcataaccagtctttatggacaataaagacaagtctgctattcatcaaaagctgctcatccacacagagttctccatctgccttccagtgtggagaaaaaggtctttggtgcaaatggacccactggattactgagagaaacaatgccagctactatgctgccaaataagagatttgtaaataaaagtaaatcaattttgatcaacatttgaggaaaactgatgagaaagacaaagcccaagattaaaaaatgcaaatagcagaccctgaaggaaatagaaataagcaagaactagaagaagatttttgaaataaatttaataaggaatctcagagaaacttgaaaagttattgttactatgagagacaggcagccaagcgttcttggaagtgtgcactattttgtccatattttttaaatgttatggatttgtcatggttaaagaccacattagtaatctggaagatgaagtcaaggaaatctcatggaacatgtaacaaaagtgaggagaaggaaaatatgagattttgcaaagaaaactaaaagttaaagtaaacagagaatagatccagaaggctcagttcagttcagttcagtcactcagtcgtgtctgactctgtgcgaccccatgaattgcagcacaccaggcctccctgtccatcaccaactcccggagttcacacagactcacatccatcgagtcagtgatgccatccagccatctcatcctctgtcgtccccttctcctcctgcccctaatccctcccagcatcagagtcttttccaatgagtcaactctttgcatgaggtggccaaagtactggagtttcagctttagcatcattccttccaaagaaatcccagggc

SEQ ID NO: 64449 - DNA, 787 bp, Bovine  19866881412979
  misc_feature (1)..(1): n is a, c, g, or t
nctggaaaaatggatcatctattaaaaaaaaaaaaagtggttaagaataaagcaatagattgcacactcagagcaggctactttttcaacttagtaaattgtgtttccttggtatgttgtttagaggaaactcggagcttcagctttcttttctataaaggacaaataataacacccatttttcaaggttgctgagagaatcagaaataatatctggaaaattcctagcatgaagagcaactatggcattattcctgatgggtgactggcagcatgattaccactttaattttgaatgatagcaatttaaatttagcatctaaagccactgccttcttcaaagaatggaatggtgtaattgccagccaacattgaagaaagcagacactgaggcagacactttgggggcaacagatgggccacatagtttaaatcagagccaggctcaaattacatggtagccactaaatgccttggggtgagagatgaccactctctcacctgtccttcccagcctctccctgcctcgttcaagagtagagcatccctttagaactgaattcacagaggagccaagatgaaatagactgttgacctctagctctcaccccatcttcaagcaccatgtctctaccctggtctctcatcacctaaaagcagctttgtcatatgactcctagctcaaagaacttgagtggatccctaatatctcccaaatgaagttcaaaatcaaggtcttgaatgaagttcataaagttaagggcttctaggatttctcactactgat

SEQ ID NO: 64450 - DNA, 1178 bp, Bovine  19866881420310
  misc_feature (1)..(1): n is a, c, g, or t
nctttccgttgaggttctgaacttgatatcttttctctttctgagttaaagagaggacttaggaaattctagagaggaggacgagttacataacagaaagatggcccctgatcattatttaaagagaaaagaaaaagaaatgattttctcactgtgtgattcaatgttatttactgctgtgaactatatgaagcaattctgtatgctactggcatcaaatgtgccatggtcaggagaccactgaacttttaccacactacttctattaactgagatatccacactttgaaatttctctcaatattgatccaaccctcatttgtactcaagatcatggcacccagagagcatgcagcagttacctcctttaagggagccattctgaacagggtctaatgtatcccctcatgtttgggtagaccacaggctacacagcataaaagagaaagattaggcaactgagatttcagccttttacaaaatatagttcaagatggggcatcttcaaagcttattttaaaaaataatttttcatcatttgggagaccatcacatgaccataaatgaaattataaaacttcagtgatcctgagagaatcatgtcctagagtccaggaagatgagtctacaagatgggtcaaagctacagaggagggactttggcccaactgaagaaggaaagaaacaaacctaccaaacttggcattcagcaaagggagagggaaaagcaacaagtgccttttgaaggaaaaacagatggaaggaaaattaagcaaagttaaaaaatatcattgtggtctgttcacaaaaaccaacagagctgtggtttctctggagccagaactttgaaaggtaaggaaaatagagatcatattacagggtactcaagggtttaatgtgcacagcaaggattctaatgaaggtctggctaattccctctctgtctcagggatgagcaaggggactgagaggtacctacacctatagcaacatgtattaacccaaatggaatgatttactgttaccatgtttgagctggctttgagtgcaggagaggaaaaaaaagatgaaggaaaacaagcttacccataaaaagaaattgtagacctctatgtcccaacaagtaaaaatgttaacattgctttttttatagcccaataaatgttctttcataaaaa

SEQ ID NO: 64451 - DNA, 979 bp, Bovine  19866882156849
  misc_feature (1)..(1): n is a, c, g, or t
ntaggatattatattgtagttggaacattaggtgtgtgtggggggaagaggggtggagaaggcaaaagaagtagactatgttaaggaattttcactttatcctgagagcactggagagtttaaaggggtggttagatttgggcttttggaagatcactttagttgttgtggagagagtcattctggggaggtgtaccaaaggtggggagacaaataaggagattattgcaaaaatccaggtgagagagaagtctaggaactggcacaaggaatgtacctggttttctccaaataatttaaagcctcagagatgacaaaacgtcattcttgctaaaatcttcctctccatcttaatatttcagtggatgccactcatttcaggccatgattctgtggactttctgaaatcagatgaaaatgttctcctggggtctttctcagctacttagccttccacagtaactccccatttttcaatagattttcattttcctcttttgcagttcctatcacctcaccagttattacttgacctttcatcttctgagcctgactcacatgcagacagcttccttggaattttagctggcagttatgatcgaaagttccctgctgcttccttaaaataaagggatcagaacacaaaatcttccctgctctttacggaagaatgataaaataagtgttgggggaggtggtaatgggaagaccatacctgctcctggtttccatctgtacacactcaaagtccctctcagtgagaaatcctacaggctgtggaattttgtatctaagtatatttttttaatttgaaattccatgtggacccagttgcatgtggccagaacttttgcaagaaaggattggaaccttttattttgcagtgtcattgcttgtaaaggaaggaccttgattatttaaaaaatttttgagatagtagaaaggaaattggacttatcagaaacctgagttggaaatt

SEQ ID NO: 64452 - DNA, 1914 bp, Bovine  19866880502746
  misc_feature (1)..(1): n is a, c, g, or t
ncttgtggaacgcctgagcttctatgatgaaataaaaggtttttactttgggatattttgagtctacaaattttcaaaattatattttatggtttctcctggtttgattaaaagtaaagtgtgggtgttgaggagtaggcgctggcaaaaagaaagaacaacagcaaacaaacaagggaacaaaaaagccactttgatgaagcatcgtcagtgagctcgatgaagcatgtttcatcccggtgccaaatgatgctcactaaaatcgcagcaatttttgatgcactcgccaatgtttgtgttatttttactttaaagatgtaacagattgctccaaaataaataatttaagcctcatgtttcaaatgagtccaagcgctgtgtctttcacttctgcacccaacagaggctcctctcgtgtctatgccacactccactgggagggctgttttcttgctttgtttttcaaagcggagtctgtttttcaccattctgttccaaacatcaggggttctgtcatcattcggcacttgaagcgataactcctctttatccgggaaaaatgggaacaaactccatggcgtctggattcgtgatccggtgggaggagggcttggaaaggcttcggagagaactctgggctgagaacataacccaagcccacgggaatctacagtgtgcacactgattcttttctagacgtcgagccacgagcaatgggtcaggttttacacacgatggtctcagtttaacttaaaatagcttcagacttggccaattactttcacttgagatggcccatcgtcaatcagtattggacttcttactgggttgtttgcttttatggtataatctaagagaaaagaaacatctatgatttaaaaaaaaataattataaaaaaccaagaatgtatgctgttctctgctccctaaatgagcgtgaatggcttataaattcagaaaataaagatgacatgtaaaaacaccagagcaataaaccgacagccttgtgtcttcgttcatgcaggtcgccactgtgaggtccatcagatgaccgggaactacatgtgggaccccgacaccaacaagtcatttgacttaggtatcaacagagacagccggttgcccctttggtggaacggatcagaacctctgtgggtcactctgaccaaggccaagaggaaggtctacatgtactactggccaggtgagtgtgctgacttccaggccactccagcctcccaaacctcaaagtacagtgacatctctgaggacaagcatgcacggggaggtgtttaaagaccaagccagggtttgaaaaactgggatctttgttcaaaaaacaccttatggaagtgttcctttatattttgctgcatgtagatgtgtttgaagaccaagccaggctttggaaaagtgggatctttgttcaaaaaatggcttatggaagtgttcctctgtattttgttgccctgtggcatgtgggatcttagttcccagatcagggatcaaacctgtgtccccagcattggcaggcagattcttaaccaccagggaactctcctttatattttggtttgaacagtagcatcagaccagacactatgccatctcttaccatccttggttcagcaatatttctgcagtatagcatgcattttcatgggcaaaagtttggacacccaggagagataagtaatagggtgcttatttgctttacagaagaatttagagtaccagttctatagattttgagatctcctacaatactgaaaagagagttcaaagctcttgcaactttttgttgtgcattaaatgaagcctctgtattaatagtctgcctgcagatcgtaggtcagtgagaaactgaaggacttaacttacttcaatgagggagataagcagtcatgtagactg

SEQ ID NO: 64453 - DNA, 3355 bp, Bovine  19866880518860
  misc_feature (1)..(1): n is a, c, g, or t
ntccttttgggaaatcaagagatgaaagaggaataagatgacacatagagcttggtggagatgttgaggggggtagaaagggggccattgagaaagccagagaggaaggggccctcagcaaggtggcaaatccggtagcttttgttgtcaagaagggagagttacaggtcttcctgttggatgtcagagtgtggggctgagggaaagagacttgcagaaaggtgctttgggagagtggagttttatctgtgaccttggataatagcgagtgtttatttaattatagatgacaggtgcatattcattgtatttaatctttccatcatccctgtgggaatggtgtgggttctattattgtcctcagtttacagctgtccacaacatcctaagagaccgctgaagaggctaaagccctgtaactagtgaaagatttgaactccaggctcatgtgactccaaagccagactgtctcatcgtcaccctctccgggagctgagagttcgcttccacgagtggagtggcagccagactgcaggcttttccgagccacagtgagggggctgtggtgggaaggcaggtgcacagtcaagagtttagctctcaagggaatgtgacacctcaagtcacaagcaagcgagtttcttcccagaaaggataaactctttggaatttgtaaaagagatgctacaaggaaagaggataaacattctacccaacagggcggtcctggtccttcctggggacgggggacggggggcaggggggcggggggcgggtgtcagcgtttcatacatctggtcaaccctgctgtttgtgatttttttttttccccccaagaactgagctatacagtgaggtaatgtctttaaagtcacggatatcatggtgggaatttgctgggtgggactgtggcttccctaaggtttacagggcattcgtgattgagtccaagcagcacatgcattgataagaatactctgcatgccttggagcagccacttgaaatttttcaaagcagagtcatatccatctcacatgatcttctgctcccgtcttctgttctttccatccttatacccccgtctccagtgtggtttccccaggagttgcgtgtggcttttttggtctgattctgttgctgtcgtagatagcaatagcttctcttctcttgaagagaagcgctctcatcaaaccactgaaagtcagtctgtaccccagcactggctgtcccagagctgttggtgctttcagaggttggagggctctggtgcacttgagtaaaccagaatcgagagccgagcttaggcagaggaattgattctcctagattcattagtatcaatatgtagactctcggaaggctttaacaggcaccatggatatgggctgctccacttgcctccacggagtcaaggggtcttcagctgggagtctggcccgtgtcaccggccgccccgccccacccctggggcaggatgctcaagtggccagggtccagggcaaaccctatatgagaaaaattcatccaccatgtgctctgagttcctgtccttgggctcatagttgaggcagagcttttcctccaaaagtataaaaggattcctcccttagagagaaggtcaggagctgacgcatgcacgccctccttcagagaaggaagagttggggtctccctagcacggagctttacttagatagtaatgcagcttccttatccaggggtcatcgggttgcagaggtaagcatttcaggaaggtaagccaggtgcaatggtgttacctcctccaaggaagaagtgggaaaaaagggaacactagaggagacattctaggcagaaatgtgctttttaagctctagctgattgaaaacatacacttgaaacgtgcacttgggagacgaacctgaccttggcattaaaagaaagcagacagggtagaatttaagctaagcaaaggaagggaaaaggaagtgttctcaattcttttttcttttcttcttcctagcaagaaccaattgagtcacctttggggcttagtaacggagtaagtgatctttctcctgagtatgcggtcctgacttcaactataaaaactgaagtggatagtacggtgaacatcataggtaaactgttttgacatctcatttctttatacacacaagtagcccctccggggtcgagaatttgtaaaacgtgacttaaaataacataggctgtgggaggagggcttggaactgtctcagaatgcaagttcaggccctcggatgtcagggctgaaaaatacaatcctttgaggatcagataaaggaactgaggtggatggacctcaagaaaataggtagatgaaaagagattccaccgcccgccccgccccccggctaatcaccggcagttctcagtctttgcatttttggttatgtggacaaatgtattatttatttaacttgggaacaaggagtgggggagactgtccccaccagtcctcacagcatctcctggatgacggaccctgccacagaggtggtgctcatctctcagaggcggaaacagaagtgtgtggccggagggcatgctgtgatcccgcggagagttctgagtaccttctgtgccgcagaagcagcgctgtgcacggggaaatagatcgggagcaaggcaggaccaattcctagtttcatggaactgcagataacaacagctttgccgtctatgttaaatgcgccagagggacagactggagagatgagatgatgctgctgggggaggaactgcagcagggggctggcagcagacctggccccatggaccccgatgcaggaacacacttggaggactagagggaaggccagtgcacctggggagggctcatgaggcccttcagaaaggaagtggggtgggcttatgggggcctttgcagaccctgggaaggaggttgggtttttttcctcagagtgctggagggtgtgtgtgtgtatgtgtttaagtttttaaaaattgaaatatagcagatactaaggctcacagatgttgcatatacatgcatcatgtaagccccaccccaggaggcttttaggcaggagggtgacaagcgtggattatatctcagtaaagtcccatcggggtgctgccgtgagtggatggtggggaccctttgtaagagtggagaccaagccttgaacttgtattctgactccagcccaggaatccagaacctctgtttctttgccctcaatacctttggtttcatttcattttgctccattttgtaaacaattagggcttctaacactggtgagaatgggaaagatgaagcagagctccaagagtcagtctcacatctgaggaccttcatttgtgggt

SEQ ID NO: 64454 - DNA, 1396 bp, Bovine  19866880586345
  misc_feature (1)..(1): n is a, c, g, or t
ntgtctttatcaagtagtgaggtctaaacagcttagtagtactttctgtggtatccaacagatgtctctggccctcagaaacttaaaaataacccaccggtgcctctgtaggttcgcttgtcaccccaaagtgcttcagtacacaatttaagaatcatagttctaatcaaagaaacttagttctactctgatagaaatttaagtctttttttagagaaaaaatgcttggatcatagttacttacacaagttttatacacgtgaccattacagtggcaattactgaaggtatattttattttatttttttgaaggtatattttaatgtcaaagttttaaaacacagataattttgttagtaagacgaaacataaaattgctgctgggaatatagtttacggtatcatcataaagcacaaaataaaatctggtaatactattagaattatagatctaatacataaaaattatttcattagaaatgaaatgcttaggacttctctggtggtccagcagttaagagtccgcgctcccattgcagggggcctgggttcgatccctggtcagggttttagtcccacgtgccgtagctaagacccagtgcagccaattaaataaatatgtcttttcaaaagaaattaaatgatactaatactattgacaattacttttacagctatcattataaattcaaagataaaaaaatgaatccatcaggagacatataacaattattgaaccttattgttgagaaacttgtagctgcattttattgaatagcatctcagttctcgggataaagttttaaacagcaactggaagaacagctttatgtttaaaaatgttttatttttagagttgtcatggtgtaaaagttattcctacatatcaaagctgctggaaagaacccaagttttgtgcaagtttttcattaagtgtttcgtggtgtccctgctttaaccccaaacaagtgcacactcttcataagctgttgaatattggttcagctgataaattaagaaaatcccccttctttgaactcctaagccacagaacatgtgttacattgctaataagaaggattagacagatatgggccacccaaagtttctcctattcctggatcatctgcaatgagaaaatagcaatttaattgtgtttcttgcttatccaggtcaacagttagcaccaatacgaagatacccaactgtgtagagataaaacctagagcagcaggagacagtatctgaaaacacagggtctgaggaagctgggaaggggcagagctatagtttggaggaggaaatggcaccccactccagtactcttgcctggaaaatcccatggatggagaagcctggtgggtttctgtccatggggttgccaagagtcggaca

SEQ ID NO: 64455 - DNA, 1325 bp, Bovine  19866880632326
  misc_feature (1)..(1): n is a, c, g, or t
ngactgcctcaaggtctccttgccgtttactaatccacttcctggctctgatacttttccgctgttttcctgaataatgcttgcttcctggcagctccctccaaggaccaccaagctgagcccgtgaaaatcacgcctctccaaacttcctagaacagaggtctcaccttctaagtgccgctcggcttgccaactctgatgggtcttgtaacaataacccctgcgagctgcattttgtgcaggtgttcggccgctgaatacgtgtctctggagagcttattaaaatagctaagccaattagctctcttagacacatgtaaccttttccagggagacacatcggaggcacaggagcttgtggggacaagtccttgggggaagctcggcctttgatctcagagaccctttcctgggtctgcctggcccacagggctgggaggactcttctgatctggggaccctggggctggggggactggcctgggcacaaggtgccataagggctggcccgtgatcaagggcagagagctgagatgagaagcacccatccaatagagaggattgtggaaactccactgagaatgactcactgggcataagaggtgactgataggaacccaagggcgggggcagcatgtgcctaaccctggctgggcagctgcttttggaaggcagtgaggaaacttcagcaaggcattgtgaggcccaaagtgggttgcaatctctgcctctgggagtccgatgggaaagtctctgtcccgggtcagggatcacacttctccccagcagacctaggtggggcgtgagggactcccccggcgccccccctcataccagccacgagcagcttctttgggcctcaggcacatgattcaagatcatggaaatcttgcaaatgactgcatgatcacaatgatgtcatgctccccccgggggcggagggggaaggcgtcttgactgctgcacacggggtgtccctaccagagcctcctccctgaacagtggtttcctggtatttggatccgagaaggcttccctggtggctcatatggtaaaggaaggaacttggggggacacgtttcagtctccagcagcgtctgtatccttatctggagtgtcagctgctgatcacaattacccatttcagactttgtctgtgtggtcagtcgttcaactgtgtccagtgctttgtgaccccatggactgtagcctgtcaggctcctctgttcatgggattcccaggcaagagttctggagtgggttgccatttccttctccaggggctcttcctcaccaagggatcaaacctgtatctcttgcatctc

SEQ ID NO: 64456 - DNA, 1845 bp, Bovine  19866880659967
  misc_feature (1)..(1): n is a, c, g, or t
ntgtggaacctggtacacggcagagactcagtacctgtttgtggaatacgaagttaagaaattaattcataaatagagacagttggttcttgattacttgttgttattgttcagtcgctcagtcctgtccgactgtttgcagccccatggactgcagcacgccgggcttccctgtacttcattacctcccagagtttgctcaaacgcatgtccattgagtcaaggatgccatccaaccatctcaccctctgtcatccccttatcctcctaccctcaatctttcccagcatcaaggtctttttgacaaattgtttactttataggctaataaatcagtgactaagtacccagagaggaaagctaagtcaggcctttcacctgggctaattgttagtagccctagaagagatttcaacagagaaaaggtgttgaaaccaccagtggtcattgtcctggcccagttagcccccagctggagaccagggacgggcggacacttcagctgtccccggtccccactcagcttcaggggctgattcccatggcctctcctggacagtgtccccctcatgacaccgcactcagaaaggcggccaaatgtggccagaagctggtgaaaaattgtgagacgtggagctgcactgtggatcctccggactctcatctgcatggagagaaatgcagcaaatgcaggcttcagcttccaaaaaaaggcccatattggtctcccgaggaaagatttatttcaaaaaccggcaaaggatatgaaatgccaggctcaattctcaggcctgggattgagcggcagttaggccctgggcccaaaatacttggggaaatcaagacaagctggagagcacagctcctgagttttagcatcagctggagtggtttcctgcgggcctgaggtgctggaggtccaggatgcctgtgtcgggaactggaagctgcttgccttctggcagcgaccagggtcgtcgccgtaagccgtcggagggcacgggatgccctcctcaccctcggcgggcttcagcaagcatgatcttgagggaaaggagaagtagaaggaagctcacccgctgggcgccctgctccagctcttctctcgaggaattctgccgcctctgggccctgctgttcctgatctctggcatttcccaacttccagaacgaggctgtgcgtggcagtgggcttgccagggtgagagcagggcctggggcccaagacattaaatttggttttagaaagaggaggccctctaagacggagaaacagttggggggacttgttttcgcagcagtgtgataaacacacgtctgagggtctgtgaccaccactcccgagggctctgaggagtcaccccacaggaagcctcttgggagaagggtttaaaatgatgatgccacaaagcctgagacacggtgctttgtcccctagctcgaccttaaccctggcagcaaaaccccggagccagccaaaccgtgctcccttccacaagagtcccgactgaggcctctcccgagacatcaccgggtgccttttccagcctgagatgctgtgagcttattgcactgtggagggcaggggaagctcctgttacaaccctgtcctaggggaataaggtcgatttcatttgtattaggcccgtcacacaccttaggggttcacatgttacttactgattttaattggacttgatttcacctttgttccccagcaccctagacacggggtgagaggcctcatccagagagaaggaggggacacttcgggtccctgaccccacttctcagcaggaagtacactttcaggggctgacatgagggatggcggtcaagatgtgt

SEQ ID NO: 64457 - DNA, 728 bp, Bovine  19866880922318
  misc_feature (1)..(1): n is a, c, g, or t
nctccccatgacactctaaaccctgctgctttctgaagctcccctagagtagcagtactgctgcctgttttcctggttcaggggtcttcaaactgtaaggatttccaagagcaccattaaaggaatctctctgaagatcatcacctttcatatatagtgcaaagtctgttctgattaaaaatgcgtccctttcccactttatataagaaaggggtaccccttggtgatcaagaaccttactaaggtgcattgccctagtatttaaaagcctccaggcccaaacaaaggaacagttcaaaatattggagtaggtgtatagaaaggaatgcatgcagtgagtgataaaacaacaaaacctaaaaaaaaaccaagtaatttccaatgctgtcttttaaattatttaagaaaaacttaattgaattgtcagctgaagcagtatttaaaaatttatgatgatagatcactgtgtgaatgttagcattcaaagaagcagttcaaagaattaaatgacagactatttctatttccatctacttatttatgtaaactactttcttagcacttagacttaacaaataggaatagagtcaattctaaacttgtctgattctacagatccatcatattcatctgtgggtatacaaactgatttttaaaagatcccattcctttcattatgagaatgtgtttccaatggaaattgttaactttttatttttaaaaatcat

SEQ ID NO: 64458 - DNA, 1348 bp, Bovine  19866881272816
  misc_feature (1)..(1): n is a, c, g, or t
ngctgcaaatgtgtggctgctctgtgtcatgcattgcaggcattattacatcgtttttttttttgtttgttttgtttttaaaggggttagtgctttagaatcaacttttctatttatctgttgagtaagagttttctgaagtgttcttggggattctggaagggcctcttcttgctgttctgccagcagtagcattttgcctttgcagaagaatcccaagaacagctgattcatgcagagagaaatgaaaatgtcattacccttttcaggacatttgcaagatgtgaaaagaaggattttagtgccaggctggcaggcagcaggggtttgctcggagcctggtgtttcagcctggcctttatttttttccattgttttcattgtctgaattctccagaaccctttgcggggaggcttattggatagagccaagataagtcatcactaccacttttctagaacccaggacacagcagaaacttatctgttactgaccatgggtagctaaaatctttcagtcaggaattccatagcttgctgctaggaaagacagcttcttggttgtattcctttttaaacttgatggtctccacaaaaaaaataggctgtttgcctgtttttcatgacagggtccctttgtttgaactattcaagtgaatttcagccttctctaaccactttcattcatttaggaaactggtatttggaggcagttgtttgctatttttttcctccctactgatcattgaaatagaatcccagtagtattacaaaaaccacattcattgttgcaactcggtcttctccgtggtctaaatatgatgttgagcaagaaaagggacagtttctttgagtggaggtacttgccctgtgggcttccctggtggctcagtggtaagtaatctgcctgtagttcaggagacatgggttcaaccggtggattgggaagagcccctggaggaggaaatggcaacccatgtcagtattcttgcctgggaaatcccatggacagaggaaccctgatggactgcagtccatggagtcactaaagagtcgaacatgacttaactactgagcacacacacttgcattatgttattagaagacaacatgaaattctagttggattcatgaaactttattctgggaagggatgtcccaaagcccaaccctgggaaactctagagaagagtcctttttatttttaaagattccggtgtgtgaatagggattatttattatgttgttggtggcttaataagagaaatcacagtagtactggggggaaggctggatgagaggatggagaagaaggcagaagacaaaagactgatttgtaataactgag

SEQ ID NO: 64459 - DNA, 1288 bp, Bovine  19866881423617
  misc_feature (1)..(1): n is a, c, g, or t
ntgagtgtgtgtaggctagttgtgtccgactctttgtgacccatggaactgtagcctgccagacttctctgcccatggaattttccaggcaagaatattggagtgggttgccatttcctattccaggggatcttcctaaaccagggatcgaacacgtgtctcttgagtctcctgcattggcgagtggattgggccactgggaaagcccaaataatgtataaaaatccataaatcccctacctttacattttcatttctgtaattataaaaaagttataaagtgtgaaagtccccttccttgtgtccctccccctgctttttttaggagacctggccttcctccttgagatgatcatgatcacttattaatgtcacctctcttcttacaacctgctctcaacctttactacttagtacactatattattattggagaaggcaatggcaccccactccagtactcttgcctggaaaatcccatggacggaggagcctggtaggctgcagtccatggggttgctaagagtcgggcacgactaagcgacttcactttcacttttcacttcatgcattggagaaggaaatggcaacccactccagtgttcttgcctggagaatcccagggacgagggagcatggtgggctaccgtctatggggtcacacagagtcggacatgactgaagtgacttagaatagcatagcatagcatatactatattattagccacttttgtttaagattctggttttctgtcacctagccattccctggtttttcacctagtggacttatcatatttagccacaggaatggaacgtgcccagccagagaggctgccaggcccacacccctgcaggcatatcctcttgtgactggccctacttcagtagggcatctccccacccaacatctctcaacaggcctctgagatggataattgcacatcacacaaacattaattcataaaatgctgattaatgtttatgttggaggaggcaggcatattaagaacataagagtctacctagagaagcaagcatgtcatgcaagtcttccttgtcgatgaacccatccctgttctggtcgatcatgttgaaggcctccttgaactcctgaatctgggactggtcaaacatggcgaacacgttggaggtcgcacgctgggggcgcttcttggtcttggtctttgcctttttgctcgacatggtggcggtttaattctagaattgaaaagaaaagaacataaagcaaaactgaaggcataaagcacaaagtaaagaaaagga

SEQ ID NO: 64460 - DNA, 1031 bp, Bovine  19866881580851
  misc_feature (1)..(1): n is a, c, g, or t
naaaaaaaattttttttttttttaattggcttcttccttccactcaccttccagtctcccaccagtgtctgccattggtagagctcactgggaagccagctggctgggggatctgggaaatgtggtttgcaggcttccatcccctctatagagaaggacaaggaggtgggaatggaactgagagactatagaggaacagcagggtgctggtttcctccacacacacaggtgtttcccacagatgtgcatgtatctccagatgctttctactccggtctatctgaagcaaagagaacataggttgaatgtttcaaaacctctaacagaacattacctcaccacatttaaccatctgatgaccaaaccgctcttcttctcggccatttactcctttcttccttgggattggcaggaaatatgtcaatgctggtaataacttgcgtgtcacactcctctttgcaaaacaccagttgaatcattttggtttccttagaaacagggacactggggacctcgcatctagtcagcaacacaaccagtttccatgcccagtctattccacccgcacatcaatatgggtgaaccccagtgactggccatccctaccagggctgagagacaagtaatcttcaccaagcctctgtcctgggccaggcgccacgctgtgtgttcgcacacagaatccactgtagtcttcctaactactctgactgctaggggtgggtgcacccatttttcagagtaggaaaataaagtccaacattataaatgggacagtcagagaatctgaacccaggcctgacttactccaaagccaaattatttccataacacccgcagcctctagatctaccttgagataactcccaagcatgtaaagagcaggaagagggctgggcagaagaagacgagagctgaatgactggttgggacaggagtggcaacagagcaggggctgtgatcgtcaccactcgtcacagccgtctttccgcttgtgtcccctctccctgccagtatctctcagaggttga

SEQ ID NO: 64461 - DNA, 1829 bp, Bovine  19866880572250
  misc_feature (1)..(1): n is a, c, g, or t
ncttcagtggaattaggttgtttccctgtcctagatacttttaatgatcctacagtgaacatgggggtgcacatgtctgtttgaattagtgttttcatttccttcagataaaagcccagatgtgggattactggatcatatgggagttctatttttaatttttccaacaacctcccactgtttcccatagtagccatatgaattttaccttcccagcacagtgtaaaagtgtaatgccttttatactctaaaggaactacaattatatatatatatatatatatatatatatatatatatatatatataaaatctccatgcttcagaatggatcctcatgatttaaaaaaaaaaatcatatgttttctttttcagaaaccactaagaatgtgtcttttaaaagcttatctactctggccattatatgtttaaacaacatatcatgcttgtatcaacaccagagtaacaaggagcttatcaccaataatttttttattattactccccaaaactgacttaaaattgcaaaacattaggggacttcattcaaatgagtattttctgaaattatattatcaaactatcataagtaaattaatgagtatattaatttagaaatcattagctcatatctcattttagctaatactgctaaacaaatcagagtatctgcaagaactttaattatttagttaaataggatctgaaactaaactcctcttctgcatgcgttggaaatagactgcagatgattacatttccatagacttcacaacatgagctgcttcgagtttgaaataagaatgttaaggttgccaagtattataaatgctgttattttggattatatagagttatgaaaatccaaatgttttacaaagttaaaaagtattctttttttgctcacttataactcaaaaatcactaaagtcattctgctgaaacacgccaagaaacccagcttcttgccatatgcctgcataatcttatcaaatctctgctattcacatgcacattcttacacacacacacatacaaacaagggatgccaaagactaaaaatatatgttttacagaagcttgaattgagaccatgacctcatttgaacacagaatgtggcctatttctagggctattttaagccagcattaacaaaattacatacgtgttttttacttggaacttcctggtacccgctgtcatttcatcccagtgattgaaataatctcatagatgcataacttatttctaaattttatttactgtgtacaacttgcttaatcagttaataatgttataaaataaaagcatgcaggaagcaccagataagcattagctataatataataatatatttagtatttaatagtaataactataattaaaacacatgtataaataattagatacgggctttaaattagtgtctaaagctcttaaactctattaataaattgcttattaaatctttttcctttgtgaaatttagcagttcaaacaatctgttctaaggctctgattgtccaaagtgcaaaatttcctatttggaattacccattgcgtaaccatgtaatcttcagcctccacttctaggtcttttcagatgatgataacaaggattgtgttctcccttgagacatgggactgagaagggaatttcaaatttggatattctgaaatgtttaaagaacacatagttcatgccaaagagtaattaaatactgctcctatatgtctatatgttgggaaaaaaaggagtgagcggaaaagtgcctcaaatatctctatactttgttccaggataacaatttttaggatataggaggtg

SEQ ID NO: 64462 - DNA, 1089 bp, Bovine  19866880613699
  misc_feature (1)..(1): n is a, c, g, or t
nttagaataatggtggtgggaatgaaattcaacctttatttccgtatttgctctcatagctggtcatgctttaggcaactttcactgtattcagacctgtcataggtgttagaaactgatagacctctgataggtactaattatttcttaagcatgagagtgaataaccatgtataatattccaacagagtaagaatttgaaagtttttatataaattttcaatattgatagtttaaaaagatacaagatcgaaataactgacctaactatagacacattgcatatgtatgcatataagtgcatatgtttatatatattttgcatacttatacagatatatatacaaacataagcacaagattttttctttttttctttttcaattgcaaatttttaaaaaaaatattacttcttgagtattccccataaaataatgaattagaatatctatcacaagagttatatacatccttcatcttgataaaataaacacatacaacattttgtagaaattagttaaggggaatgaagacaaacatcccatatgtcatccgattgtttaagattctccattcgtactcacataatagttatgaccgagagaaatctctcatgtttcccttttgtgagaatgataatcaagtgattactgccatctgtatgtgagccagactgtgttataacaaggtcaaaatttctgtgtggtaaagctttcaaagcacatttataattgagaaccactcttaacaatagtttttgaggagttactttgtgcccatgataatgaggtttgacctgtaatgccttttctgtttgcatatattgtgaaatgatcatcacaataagtctaattaacatctatcaccatatttagttactattctcttttcttgtgatgagaacttttaaggtctaccttcatagcatcttttaaaaatacagttcagcattattaactatagtcagtatgctgtagattatatcttcaggacttatttacattataactggaagtctgtgtcttttgatcctggtcatccattttgcccatccccaacccctgaaaccaccaatctgttctctgtata

SEQ ID NO: 64463 - DNA, 1343 bp, Bovine  19866880829678
  misc_feature (1)..(1): n is a, c, g, or t
nccgttgactaaatagtagtgatatagtcatattataattactcatctttattttattacacaagataaacaacaagctaaaccactaccagatgattattggctttgtgttttatttggttataatttgcaaatagatgtttaagtaaggttatttactctctcattgtttctctcccatcctcttcaccccattagtgatgggagggggttggccaaacacacacctcctgacacctgacattgagactgaaagaagggcaagcacagtgcagcaagccgcttgcagaggcatgtgtgctgacactggttgtagtaaccctcagatggaagaaaggaaaaaaaaagaaatctcttaacggagattgagagagcatttcaacatgtcttttgactgacgtgtttgcagatgtttaagtactttgagcggaactataatttatggaaacatgattttgcatctggttgatttaccttagaaacatcccattgaaatatgacatttgattttgatttttcaagaccacctcaaagacaaactggtttgtgttatctcctaatgctgttgacataaattatgtgctggtcgtgcctatttcagcaagtcttccttcagtaataccatgaattgtaaatgtgttactaaactagtggtaaactctgtgggaatggaccacacattttcaatgtggggtgatatcacccacaaaaagaaaaaaaaattggcttggagtgccaatttgatattgatattacaatgggtctgtaaacctcccaaggggccaccgtatatacatgatatacacatgaaattttatggttgaagattatgggcggggggagatatctatataaaaggctcttgacatggaagtgatatgtagaaaattaataagtttgagaaacaatggtataaaccagttgtatatggtttgaagacataaaattggttgaccaagaagtaattgatcaagcaaaagtaaaaacttggctaaaccagtaaaatttcaaatgaaatagtagtaatgctgcagtaaataatcaccttctagagagtttcctattggagtaggaaatggcaacccattccagtattcttgcctgggaaattccatggacagaggaacctggtgggctatatagtccatggggtcccaaagagtcagacatgactgagcatgcatgcacacacacacatacactgattttcctataggagttcttatgatataagagaacttaaaacaataacaattacaaaatttcagagtgtgctgttatcactacttatttttagattagtttaaaagaagtggagtaaattaaaagggcaaaattactgg

SEQ ID NO: 64464 - DNA, 866 bp, Bovine  19866880846339
  misc_feature (1)..(1): n is a, c, g, or t
naatattttaaaaaataaattattttttaaaaaagtagaagtcaggaatctccctaaatgaaatcatttgaatggaagtaaagttcttatcactaaaggagtaataaaaatttctcatttaataactagcagtagggatttatttctgtcatgagttagttttgatgaaggtctaaaagactaaagataggattcatgttagggattttaggtcatgaggtgagttaaaaagaaaaacaaacaatacccctaagaaggccatgattagaagatattttggagccaatcatacacagcaataatagtcataattttatagccaaatgttttgtaaacatctcaatgatcagctataccttttgtacagctataccttttacagacttttaaatttttctaagaaaatattttgaactataaaaaatataacaagaaaagtttgttttcaggtttctcctcaataacaattatttgtataaagtaaattgggtttttctttgagttgctcagcattttgtgctatgggttgtgctttgtgggccaaaatttataccaagtggaaatttgcctaataatcattctattgttttgcaggattccattataatcatagatttggaagataccttagatcaatttaagccattttccacatctttaaatttttaaaagagagactgtttgtaaaccagccaaaacatttgattcattcgtgtcttccagtttgaaattcttattcaaacctctttctctgaaatatagttgagaaagtaatagatgtagaagaaaaaatgagggaaaatgtttactctttgttttccaaattgttatgtacattaaggcaattcatggtttaactaaaaata

SEQ ID NO: 64465 - DNA, 1255 bp, Bovine  19866880864983
  misc_feature (1)..(1): n is a, c, g, or t
ntaacctactaccacttgcaggaacagggaaaagagcttaatcaatttgaaaccttttctcaaaaataatgctatgcagttgagaactacagatggggtggaggatattggtttatttgtaagaggactcagatctgaaaggccccagaaaccaccctgagagaggagtgcagagttctgcagtatctgtggcaagactctgaaggagacaggaaaatgctggctgtttaggaagaaaaatattgttgataatcatctaaaaatcacactttaatgcttaattggtgacttatttattcaacttgttgaataaatactttatgcaaagaagctgaaaggatgtatttaaatgaacagtgttgggataataagcaattgatattcagaatccacccccttccccacccattaaactctgtatctttctctcctgattgcttctttcctctcctgattgtttcttgcctctcaaaacaccaatcacattggaaaatttatggacaggattttcctgttttagtctgttacacaatttttgtccaattctaccatcctcaaatagcttttttttaaaacctctgcctgtgtgggatagcccaatatgtgcatgctcagttgtgtctgactctttgtcaccccatggactgtaacccacctggctcttctgcccataggatttttccaggcagtaatactggagtggattgccattttttctaccagaggattttccccatccagggatcgaaccctcgtctcctgtgtctcctgcattggcatgcggattctttaccactgagccacctatcacctctatgaacatatccactaccaaatttgtaagcagagaacagtcacacgcatatagatcaatggaaaatgcacccttgttaataagttggtaaaagtgttcattattatttttataataaatatattccagagaaataaagcaatcaagaaacgtacacccacctctccagaaggataactcttcaagtataacaacagtacatttcttggtgcgtagtaaaaaaaaaaaaaaaataggtactgtgtatgtgatctaaacatttctaatgccttaggagaacatttcttaggcatgaactcttcataaaagggttctacgatatctattttgagttcaagtgaactacttcaattgctttgcctcttataacagatgatctcaggagccagagataaaggacactccagatgatgatgagaattgataatattttgctcagga

SEQ ID NO: 64466 - DNA, 741 bp, Bovine  19866880882164
  misc_feature (1)..(1): n is a, c, g, or t
naagaataaagatagaatgggttacttcctaaatgtttattataacaacgggaaatgttataacagaagaaatggtgcaggcagtaaaattagaatctccaacagagtttcatgaatcttctataaactgaatgaaaaccagatcaatactgctatccaaattgtagcaacagtagaaagaaacaagtgattatataaaccactagaaacaagaaaaaaaaaatcatatatatactagttacagacattctaattgtcttcaaaaattgatttaagtgttggaggaaatggaggtaattggaaagccaacttttaattttgagctttaggctattatgggttttgtgttttggagtgctgcctgtaatgagtagctggctttttggaaacattaggttacctaggtttagtgccatctgatacaggaatgattgcagaacagcaaatgaaatttagagagctaatgtgcttcattccacttatttaccaaaatgaatttcactagatttgtatttgtaaccttcagttttatctttattttttattctgtgaacctttcatgattggggtcttctaagaataatagacttgtgcatttgaaagctttgtttttccaagaccttattttgaagtgataatccccccacttggcagctgttctactttatctgtcaaatagcccctagggtgctatgcattttcagtgtttggaaggtttatcttgaagataggtacagggaa

SEQ ID NO: 64467 - DNA, 583 bp, Bovine  19866881022390
  misc_feature (1)..(1): n is a, c, g, or t
ntcacactactatgaaatgcattccacaaacaaaagaatcaagagagaaaatgatgaatggccttaggaatagtcatggtttataataaagattttatttaaaaagcgttaaaataaataatacatactctagaacatcactgttctgggaaatttattctctttagaatatgagttctagaaggcaaatcttacaactgctctgggggctttcattggctgatttacaatcctacaattgtgggtttttttttttttttttaaatctgtggtctgcagtctttttaacatacttctcaaaggtggatatgtggtggaatgcagaccccatcaacactgtggttttatttgctgttttgtcccctaactgctgataaaatagactgcttagaaatcccggaggaatatgattggggccagagttacattggctcataaaattcaaacagttcaatgcttttcttgttaattactgggccacaaccagaaatccgaatgatagcagagaaacacttctttaggataatgattgatttccataaagatgagtgctttaacaaatttcaatatgcagttgctgggg

SEQ ID NO: 64468 - DNA, 1005 bp, Bovine  19866881366582
  misc_feature (1)..(1): n is a, c, g, or t
nactatgaagctacataattcaagaggtgaggaactctcagaacccaaccaccagagatttcccttaggaaaatatagggggtagattacttttacagaaaatacactcataaatgtaccttgatatagtgtaccttaattgtcgtcaaaacaaccaagaaggctgaccttgacatgtgaaactcattgatgtaggtatgtcagagaagtttgctttaaaattattatttttccagatacctccagttatctgattttaataccaaagaaactatctgcctactttattaaaaatgaataaaaaagtacatttgagtacatttagaaccagctagtaaaaagttttgagatgtacaatacactatcctttaaaagaaataggctttcatcccttgcatttatttctaacaccacataataagcaattatagtatttttttctgtatgtactgcacgtgatctgcttaaagttaataaatttgacaatgctttggtacaggtagttaaaattctagtgtgtgattaacatttcaccaattcatggttttttcttaatatcttagggaaagttactgcatcaaaatgaactttcttaaggctggaataatagcaggtaatacaatagtttgctgtcaagtctccaacccttcttcgattttaagccctgttttataagtgcgtctaatgaggtcaacaaccatcaaacagaacagaaatgtcaccatgggctaaatctgacaatttgctcattattcactgtcaagaatagtttatgaacttttcatgataattcctaatgagaatacccccaaaattgagcacaaaatgattagaataaatgaaactggtctatgtgacagactgatatattatacctccatgactttaccattttaagaaataacatatataaattttaaactaactcatttatcataatatctatgacctttggaattactatttttcataatctctgcttatttatgtcacagatttctttgt

SEQ ID NO: 64469 - DNA, 1344 bp, Bovine  19866881540378
  misc_feature (1)..(1): n is a, c, g, or t
ncctctccctctcccacagagtccaaattttggtctgtattcttatcttttgactgtttaatcttggcctccatgtgtgtccgtctaaagtatgatttgccacatactttaggacactgggaatttataaactatcttttttctatgtctcatcagttggctttctattaggttctgccaataggaagcagtgttggtagatcagaaagtggaaggaaaagagaagctttctgattgtggtagagctagagttactgaaatagaattactaattaaaattactaattagaattctaattagaattacttggagtaggggcagcagtgaggtgctattggacttcagctttttttagatgtttcaatattgatcacccattggtgtgcccaggactaccagtatagcctcttctagtgtgtggtacctgatgcagcctggtaggctcctgctcagaggtattagcaacttaggtttcttatctgatatattatctcctcttcactttcattccttcagttctggtcacctttactttgatcactcagtcctctgtaacctgagtaaccactcagcctgtttgaacaacatagattgatttctatttccctgatgtcttagacatattacaagaaggcaacgatgagggaattagtaatttgtctaaaactcattttgccatacaaatgagtgaatgtgatataatgcagagcaaacagacattgtgtattttctgggcacagattcctttagtagtttgagctctcttgaagcaaaacaaaaattgaagtaaataatcacaaaacccatttaggtaacctgaaatagctgcctaaaatttcatgccctaaaattcatgcactttactctgttggatacatcttggcattttattttatacatgattctaacaagccctttttatctctttgttcagcccactgtaaactaccttggaataacaattttatatgggggtgttagaattactcttaaaagcacagtgaccaaaatgaaggtaaatcattgacagattaacaatagaggaaaaagaaatactcaaaaagagaaacatgaaaactcgtaaagtatcatacagaataaaaggtacagagacatatttatttaaagctttaaaaatgtctccaaatgtataaaattgtccatttttctgacattttcattaatacattaaactttatttcagcttttatattttaaaacatcaatatacagctgtgtaggaaaaattatataacagatattacttgttttaattaagtggaaaagtacagaagcatctctgatatctaaaggaaatactctaaaggaaatctcatttaggt

SEQ ID NO: 64470 - DNA, 1149 bp, Bovine  19866880463018
  misc_feature (1)..(1): n is a, c, g, or t
nttattaatcttttgaaccaaaacacaggctaatatggtctgttggctgtgttaatgagttctgaaaggcgaaacacactccctacagcgatacagggcggttcagcaagaacttagtcaattatctcagagctttagcctgttacctcaatcaatacattgcactaaggggggaaaaatgaaatataatgtgctgctacatgctacttcactttagacacttctgatgaaggtcattatattaacatgattcatgtgtgacctataatatgatttcagtgtcggctctggctaaaaggaaaagtacttaagttcctggaataacctgagtagaagctggatttgaagtagcttctgctgagtttttcctttcaattcgggagcttctggatgaaacaccagtctgctcaaagggaagaccttgtgctctacagctcatccaggaaaaaacctgggaggtcagagagacattacatggtgtggccgctcccatctcgtggccactcccctttcaggtctggaatctggaaggaagggcaagtctgagaacagggaaaggagggaaggtgtgtggtacccaggctcagtgaaggatgtgacagggagcacggccagcatgtggagggctcagcctggggaagggcagggtctgcaggagaatcctgggggccttgaacccggctgtagggtcagcaggtatttgcaaagcctttccgggctcaggagctcctatgacccctgagacagtctaaggagaaggaggacaggtgtctgcatcctctgtttccatgtaagaagattgagatctcaggagacagggacttggacaagggcaacgactgtaagacaaaatgactggctcttcagattcgtgaggaagtccttgaaattctcaaggagaatcctttaagcctgtaacgctaaggtataaatgtaaatgcacatgcagcccctttctttagggctgccccctccctgctcagaatttaccctgaatttcaatcagctgccacacatgcatgtgttgggtgtgtgaagtatgtatgcgtgtgtataagatgggaatgagaatagggcctcagaagcatttgaaagactcttttttttttttttttttatctattggcttctttccttctattctaatta

SEQ ID NO: 64471 - DNA, 1531 bp, Bovine  19866880491953
  misc_feature (1)..(1): n is a, c, g, or t
ntcttgaatctaagttatgcattggtcatttcctctgcatatctgtttaatggttgttaaattaaattgctttctctcaagtggtgatttttatgtttttttttttttaaaccatcttttatttccactttgctccgtcaccctctggcctgactccagctccgcacgcctgtggtggaggctctgatgtaatatttaaacaacaaaggatgcatttatttgatccagggatgtgaggagtgccggctctgtttctggctgtgctgagctttggagtccagaactggagtgtgctcagcatgtctggctgcacgagggggtgaggaaggtgttcactcagagcacccctgccccagagcccccaacagcggcacggtactgcctcctccacggcttccgtcggcctgtggtcactgagcctgatgttgcgctctgggatgggcgcagcctcatcagcccagcccagccttcaggctggtatttccaccttcactttgctggggtttgtctgctttccacctgtgcccataaggctgggtttccagtctgctatctcagggtagatgggcctcccagtctcatccccaagaccttcctgcctgcatttctctgaactctgagtgtctgcccactcactcactcatttgacagatcctcattgagcagcatctctgtatcagatgtgaaattaggctttgggttatattctagtcgggagacaagggagaagctcttctataatgtgcagagagtggtaactgctaagagagaaacaactcagggtaagagacattggtgactgcggtcttgtatggggtggtggggaaggaggctttggggcagagccctgtggaagtgagggccacgttttgtgtgcattgaaggcaggccttctctcctgaggcagatttcattccccagggaacatttctctgtgtctggggacatctcagccttgggggagggatgtgtctcactggcatatggagggcagaggccagggacaagcctaaggatcctgcagtgaacagagcggccctgcatgcagagaaccatctggttcaaaatgtcaggctaccagggtcgggaaacctagtcggggaaggggaagagtagacaagaacagaggaaacagtggccacaaaagcagaagggaacccccttaggaacccctgaggtgggagcaggtttggagagcagcaagaagctggggtttgcagagaggagggtgctgggggcgagtggcaggaggtcagggagcggtgagggcacacagagctctgtagaaccttgcaaagattttggctgtgacagagcaaaggaggccacacaattgacccttgcagaggaggggcaagccctgacatccctctggctgcagaggagagcgtggcccctggcttgggcacaggctggagcagccaggattactgtggccatcttgctggaggtgctggtgcttggggccaggaagcagtgtggtgcttgtggtttgttgttagattgggtgcatattttgaagctagagtca

SEQ ID NO: 64472 - DNA, 1790 bp, Bovine  19866880498968
  misc_feature (1)..(1): n is a, c, g, or t
ncctactgcttctcccttgctagtgttttccttcctccttctagggaggagtgttgtctagcagaggacagttccttgtactgtgggactgaccttcccgccccactcttgtgaaggccagaggcagcatctgggagaggtgaacagggaggagcactgagtagcactctttgctgagagccagtctgccagcagactgctctttgtgggtcccagatcttatcttatttcctctttgggtttgttgttttctcttttttcaaaaccctgcttattaaaatccaatttctttttcataataccaccaaaaatgcaattgcttgcatgtaaaaatcagtcaggcataattatttattaggagtgctgatcccctggaggaaggcatggcaacctactccagtattcttgcttgaagaattccgtggacagaggagtctggtgggctacagtccataggatcgcaaagagtcagacacgactgaagcatctgatcatgtacacactgtataataataatatacatatatcataacatatataataatagtgatgtatagtaatcaataaaatggggcttctctggtggctcagtgctaaggagtctgcctgccagtgcaggggggcgtgggtttgatccctaagttgggaatatcccctggagaaggaaatggcaaccctatccagtattcttgcctggggagatcccatggacagaggagcctggtgggctacaatccatggggttgcaaagagtcaaacatgactgaagcgactgagcacaaccagtaatttatgggggcaaaaagaagaaacagtcccaaaagtcatcagtgatgaagcaagttacattgtgatagaaacatggaaggaagacaagtcttcggtggcctgggcacaaactcccaggaaaatggtaaaaggaaaagccaaacatggaactctatgtcaagtgtgagctcaatgttgttttttaaaaatactctttataatgcatgattacagtacccagtgtacaattaaatatatagagtataaaatataagtaaatattacaaatataaaccagtcattatttcttggtggaaggattgtgaatacttgtgattacattattcatttctgaatgtgttattttttgtaataagcatttcaatttataatgagacaaactacctgtttcagacatttttcttaatctaccctgattatagcaaccgtcttacttcctttttgctcctacaaatttctagttcatttccactcatctccagcaacgatgatgactaacctcagtagatcataaaatctgggggctgctgatggtgaccatctgaggtcactgatgtgggacacagcttttcaaggttagcatcatgatctgggagaaaagaagggggtggagggtcctccttcaggcacaacagttcacacacacacacacacacacaatcaacaattacttctcaaaacacttacttagaagcaggagcgcattattaagaaaaatcaaaacttttcactaaatatactgaaaatactttactaaatacacaaaccaagagccggcaaagagctgcaccgagagaacagtcttaccaactattttaagtgctaccccaggacttccctggtggtccaacagttaagagtccacctgccaaagcagggcacacaggttccaccctgctctgggaagattccgtattaacgtgcagcagctgagtctgtgctcacacacactgagcccttgctccagagctgatgaggctcaactcctggggtgtgcaccc

SEQ ID NO: 64473 - DNA, 2683 bp, Bovine  19866880520706
  misc_feature (1)..(1): n is a, c, g, or t
ncaggccttgtttttgctgactgtgtagagcttctccatcttcgactgcaaagaatataatcaatctgattttagtagaaaggatttcatatttcccactcaaaggtaaggactgtttattcatttggtggagagtcttgagctggagaaagggatatttgcctacagtttcaaatagaatataatgcaaataatttaccaagtgcttttcccaatggcaaagaggaatatcttggcattttaattcatgtttaaatttggaagtgagttcagggaatgcattagtatttctatctttcaaaccaaggaatggaggtatttgtttctcaaagccccacactgggccagaattctggcaagaacagtataaattagtatcattacccttttagtcctgagaaccaccagcaaagttaagttgatgttcaatgacatcttttaaaggtaaaggggcagaagtggggaagaaacataagtgatggacaaagagatgaaaaattgaatatagactaaaacaaacaaacaaacaaactgtatttggccatgctagaatcatgtcaaatcatctgtcttccacattgaagtatttgtgttggggttgcccactgtgagagaagactgtcctgcctacagttttcttctcatcagactcgtttattactgaaaaaatgtccctttggtccagcagattaaaaaacctgattctgccttaactattaagcttctgactttgttggataaaaggaccaaccttctttattgccttctagaacaatacacttgatagctcttcctctgtaggagataaagggaattaaacttgatggaatacagatttccattttcaaaagaactttaagtttttcccacagtggtttttgtggctccgttgccagtctctgaacaattttgtaattcagtcataattctgtcaacagtaggctgaggaggatagtggctacagttgtcacatagccaggctggctatgtgacataaaagatgctcaaaagatttccagtagtgcatgatgggttctataaggatggaccaatgttcatggaaccactggctttatctcaacaatgtctatcttcacctcagaggctgttgctagggtaattaactacttagcattcagagaaaaattatacattaggttttatgtctgttcaaacttctgtatagtttaattttgaaaacacagccacaccattgatcagtcttagtggggaaagttacagttgacttgcaagggcaattttaaatacacatatttgcaaccagatatctactgttaaatgaacattttttgagtcattaactgctcacagctaaggaacaaatctcacaaaacacggataattccaccttatcctctcaaacaaattttattcatattctgctctaacaaatatagcatgaaggcaacagttgtttaagtttcttagtgtatggcacggatgaaaagaaacaaacatattcagaagcagtccagtactgaaatgctggtttaacaaaagaggcacgtattattctacttagcagtttataccagatctcagaagactttttttttcccttgcaagcaacagactacatttatttgcattaagtaaaaacatatcttgatcaagaaaattactttttttctgcttttcctttatatcacaaatgtcagggtaaggcaaatccttaatgaatcgtatgataaaaaccctattccccaagaaaatatattggacatattctgctaactttgttatttttcaaagcaaagctgacatgcaccacatacagagaaatgtcatttcaaatcgagtgcatcaagcagaactgtattaattcacaaagaggcttttcagtgtttcatagaaagatgtacaattagctgcgatgactaataggtgacccagtatcacagactgtgtttcagatgccttctttgtaagcttttgtgaaggaaggcttgtccatcacttgtgtagttaccagctagaggacagaccctttgtctctcctacaatgagtaactttttaaatagaactattatgtagaaagcccacctccatcctctgtatgcaaacaggacttaaataaggggctatttgcctcccactctccttcctataaacccttgagtcacctagcctggctagagtgtggttggaaactgacttccagaattcacgttcggagaatgaatcagtctggcaaattttccattgcacggtttgtacaatgacagcaccagtgagataaaggtttcctgtgttgtgggtatcttctatgtggccaaaagctagatttttaatgttttactattgaaatgaaaatcgcttcattgtttgttttaagcataaaatcttctagccaaacagcaactcaaaagcagaatgagggaaaaagtgaaaacacagtctaatcataaagtgaaatgtaaaccaattcgggagcagggtcgatggtctttactcctgactcaatttcctggatgcagagcccactttctttttctataattttcaggcagagagctccttcctctcattgatacccacccacattgaaaactggatgaatggctgtcattgacatcaaaaggaacaccaggacagacataattctgatccctactgttcctgccagagacattagatcttgtccgttaaaaaaaaagatcc

SEQ ID NO: 64474 - DNA, 1250 bp, Bovine  19866880703468
  misc_feature (1)..(1): n is a, c, g, or t
ngtttatcgcagcagtaacttttaagtcccaacacagaagtttaactcaacaagacaatgggcattttataaagaaatactccagcaaaacagagaagagtctgatgaagccaacagtctccatcctttttatacctgaacagtaattagtcctaggatgcacacgttccccttacctaaccaacttgtttttaagaaaacacatgtacaaagattgagaaccaaaagccaataccttgattgaggtgtgtggcctccgtgatctgaacgccgttcacagagcactgggacccactcagggggatcagagtcaccgtccccccaacattctcaaagatgcagtgctcactctccaagtcgaggccgtgaagaactgagacgggaaaacaaaggaagaaaatatgtacattggtacctggtgcaatgattcccaaccttcctttattttctcagtttgaactgtgaggggaacacttatgtttagtgagaaaactgaactcaggagttcacagcatcaactgacagaacaagcttttgcatgtcactcagtgggtctggatctcacctgaaacaaaggatttcaccttcagggaaaaaacagctgagtaatgtgacttagctgattaccactgacacgctttgctcgagtctaaataacttcctcctccagtacccgaaggtcccagtaaaatggaagggacagatggccccatggttcaaagacttactgtgacctccactcttaccggcactgcattccaggagcacagaccaaaggtgaaaggtgaacgtgggagggcatgaatcttgggaggcccaagaagtctccagaaatcctgaggtgaacttgacctccacagacctctcagagagtgtggctgccaagggctacctactcccacccaaccaccctcctgctgacacgtggccaggcacagacacaaaccccggtcacacaaacctacacaatttcaggcgcagttcctggccagctgctcagaagcacaaaccaaacagcttccactatgctccacagacctgcactgtgaacagaactttttctgttcacagaaaacacgtgtgctgggcactcagcatcacgtacagcaaaccctaaggtcaacacgtaacttgtcaacacataacttaacggtgagaagaagaggcctgatgcctagtttcacccagagacttccaggaattggttcccagctctcccaagttcacaataaacggtaaatacgtgtaga

SEQ ID NO: 64475 - DNA, 1294 bp, Bovine  19866880787978
  misc_feature (1)..(1): n is a, c, g, or t
ntaagtaaacatacatgtttgtgtgtgtgcatgctgagtctcttcagtctgtcctactctttgcaccaaccttatgggctagcctaccaggcttctctctccatgggattctccaggcaagaatactggaatgggttgccacgccctcctccaagggatcttcctgagccaaggatccaacctgcgtctcctgtggctcctgcatcacaagcagattctttgccactaagtcaccagggaagccctaagtgaacataggttttgagcaaatacttgacactctcccctctgccctaaatgcataagtttttgatacgtggacactgggtattaaatataaccaattgcattttatgattttatacttatcatgagacatgttcttaatcaggaaacacatgggctaggagacctccatgttggcaggatgtgaaatagtcagccatgcaaccagaaaacttggttttatacaatagtttccatctggcatattgttctgttttaaaaataacgttctcaagtgaattcattctacatgagtcagtgacttttttgagtcaagaaaattagattgaaacctgtagtaaatggatccataaaaatactcattagtttctacaaacgcacactggcatttatgccaagcacttcctcacttctggttggtgtatcttgtactgtcctcgttaccgatctttctgggtaatggtgtatgtgactatgtccagagaccaaagtggaattcccatcatttgtgtgctttctctgtttgattctaattgtttttgtttcatgaacttgacttaaggcagccagaatatgattcccggcttctgctagcaacaaggacagagtctgggacctgtgagtagaaagaggcacatagacaggaaaggagatgtttgcttctgtgttcccctttgtctgtaaagcaaagagcaggtatagaagggaggaagatgttcccaagaaggaggagatctgacagtcccagagagtccaacatcatcaattagtgtgaacacagtatgcatcattttcgagcaaagaaaactgcttttgccaatcatttcagctcctctttatcacttccaagggtgtttgttttgacagttttttatttactctctctcttttttttccagtggtacatcagaaatatggccccatctggagacagtgcataacttgatgttttccgtggccgttccaatcaggagtaactacagctatcaggggagcactaaaaaatgtcaatagctataaaagtttcacaaacaagcattatgtcttc

SEQ ID NO: 64476 - DNA, 1392 bp, Bovine  19866881190263
  misc_feature (1)..(1): n is a, c, g, or t
nacgcttactccttggaaggaaagttatgaccacctagatagcatattcaaaaacagagacattactttgccaacaaaggtccatctattcaaggctatggtttttcctgtggtcacgtaaggatgtaagagttggactgtgaagaaagctgagcgccgaagaattgatgcttttgaactgtggtgttggagaagactcttgagagtcccttggactgcaaggagatccaaccagtccattctgaaaatcagccctgggatttctttggaaggaatgatgctaaagctgaaactccagtactttggccaccttatgcgaaacgttgactcactggaaaagactctgatgctgggagggattgggggcaggaggaggaggggacgacagaggatgagatggcttgatggcatcactgacttgatggacatgagtctgagtgaactttgggagatggtgatggacagcgaggcctggcgtgctgcgattcatggggttgcaaagagtcggacactgaactgaactcagggtcaacacagatgagctttgggaaacaagatacattgtttcccctggacacatcctgttctggccacatggtgaaatgtgagatttccagagtctcatagccctaagacatgaattacagtggcttccatatgacagagcagactgcactatcatccagaaatacagtctctaacaggtttcctggagggaagtatagaaaccatggatgccccagcctcttccttctgtccactcgggataaactcagttggtgccatcttttcccgtgaacttttccagcttgggctcagactgggtgccccactcacagaatcagccctagacgttatcaggtacacaggccctcccattattcattctttgtcacttttaagcttcacagttgtagccatgttagttcttttattggttgggaaatatactggtgacaaaatcaagaggaaaaaaggcatctttctacagggcgatcctgtagaataaattggggatcaccttgagaaagcatggtttaagcacagtgccacagactgaaagagtggccacacttctgcagtccctccaatcaggaaatggagtccatttctctacccctttaatctttggttgtccgtgtgacatgttttagaaaatagaatattagcaaaggtgatccaaaatgaagattaaagagtacagattgagacttgtcttcctttggttgaaatcttaagaccatgatgtaaatgagtcctagcaagcctgatgaaaatgaagaaccacatagaggaaaacgtagtcacccagccaatagccaccaaaccatcagacatgtgagtgatgccagcttagatcagtcagctgtcataagacccacagatgcataa

SEQ ID NO: 64477 - DNA, 1450 bp, Bovine  19866881194351
  misc_feature (1)..(1): n is a, c, g, or t
ncaagcttgccagtcatcatgtcctaaggaacactagcccactcactgtccacgagaccttggatctcagctggtgtcgagatgcaaccctgccactttcccaagtgcctgacgcttgtcccatcgttatataaccatagagggggaaagaagaaaacggattaaacctagctcataaagcaagctggcagagaaagacaaacgcagtaccagtgttggtgcaatctggctccatgtgaatctggtattttgcactttggaaattcacaagtggtcaggtcagggtgcacggcaggccctggctcagttgggagagcctagagaaataattaagacacaaaaccaagaccccccagaaagctacaggactgtcacagcaaagtgctgagaatctgcccacctcaatcagggatttgcaaaatctgctccatcaaaacacatgaagctaaaagcctccagagaaatgctgacattgggaaatcactaaagtgtatccgctagaatctggtattaatagtaaatggccagggagcgaggctggctggcagaagccagggacggcaggctccaagcctcactgcattctcgctgggaagcgcagggcacaaactgagagcacgcctcctctgctttgcctttcctggggctggagctttgtccagcaatttcatttacataacatacttacactcattttcttaaacctcagacctatttctctgaagtcacagcttttgtgggttttgattgtttcatctgtcactgttgtgcctgagggaatcaccggggagcttggtaaagagaatggtttaagcagatggtttgaaaggaggctgtcctgaccctgatggtggctccagcaacaactcacggtaggtcttgccttgtcaccaggatggatttcaagcctctgcccgtgtcaagctgggctccaagaagccagcaggtggcttccgctgcagcccctaggaaggggtgggaggcaggaggaggacttcagggaggcagggagccttccagccccctgtaccggggcttcagttaagatcccaatagaccaaagggtctggaataactaaagaaaaagggccatgtcttcctcctaagggtaaggacaaacactgcggctccaagatggaagagcctatccatggcaagcagggcaggggacgaagcccccttgcagaacaccacatctggagacatgggcaaaccagttggctgccagtctcgctgagagtcttggcatcacacctacagggttagcagaaaaagcaccctccagtgtgcgcatttgttttgaggctctacctctaggaagcatggcaatagttaagaggtggtggaagagaaacactcctttaccatgaaaatagcgctggctcctagttcacaacctccaaagaagtatcagtaaatcatcgccaaatgagccggagagacctgtgtt

SEQ ID NO: 64478 - DNA, 1568 bp, Bovine  19866881956303
  misc_feature (1)..(1): n is a, c, g, or t
nctcagatcttactggtttaaacagaaatgatttctttatgatgcatacttatctcttgaaatctaggggtttattccacatcttcactcagacccagactggtcacagtagcaagagtgagagtacaaataaagaatcagttactgttaatcctagaagtgacgtgtcattttgctcacattgtcttaatccacaagccatataagttgatctaaattcaatgaggaattgaaaatagaataagtatttgtgaataattgtaaaactcatcagaagaagaataaaaacatcttcatttttaaactccatgctccttaagatattctgcatgaagacaaaagcatagaaagtagtaatatataatgatcccagaactcttgcctggaaaatctcatggatttgatccctgatcacagaactaagatccagctgcagagctggagaaggcaacggcaccccactccagtacttttgcctagaaaatcccatggacggaggagcctgataggctgcagtccatggggtcgctagagtcagatacgactgagcgacttcactttcacttttcactttcatgcattggagaaggaaatggcaacccactccagtgttcttgcttggagaaccccagggacgggggagcctggtgggctgccgtctatggggttgcccagagtcggacacgactgaagcgacttagcagcagcttagcttagcatgctgcagagcaactaagcccgcacaccgccactgctgagcccctgtgccacaacttgagagtctgtgcaccacagcgagagatcccacgtgatgcagtgaagatcccatgtgccgcaactaagacccaacccatgcatgctcagccgcttcagtcaggtccgactctctgcaaccccatggactgtagcctgccaggctcttctgtccataggattctccaggcaaggatactggaatgggctaccaagcccctctccaggggatcttcctgacctgggatcaaacctgagtctcttatgttccctgcattggcaggcaggttctttaccactagcgccaccttggaagacccaacacagccaaaaaaatacatacagaaataccacaacaatactgaaggcgcagcttgcaagtgaattcttttatgttaaaaaattattgttattttttcattctattggtaactagttaccacctattacaatgcagataaagtcaaatccccgctcagagaccccgtgtgctctgcagtagacctggacaatttagatgcattagcagttgtctgtttctttctccaagtgcttacccttcagtaaagcctcagggtaaaacccagaatatttcttagagagctaagctattttgccagtcaaattgatgatgacatcttttcttttcctgtgctgaaaatattcaaacatttcttgaacagcaggtatataggtgagtaatttgctagagaagttccagtgtctatttaaggagggaaaataaaaatagtaacataaaactattcacaataacacaataaaggcagtagcatataacttatttctttaagttt

SEQ ID NO: 64479 - DNA, 2486 bp, Bovine  19866880469087
  misc_feature (1)..(1): n is a, c, g, or t
ntcttttaaaaaagttattaatacaactctcagtcttctttttaattgcattgctagacaagacttaggggtgtaatttagaaagaagcagtttatacatatcctcaagaagcagtttatacatatgtacatatacatatacaaaccaaaaggaaatctttctcatcatttgaaacaaatggtttgctaggttaaaagaatgacccacctggatatataactttagctttgatttttaataactctttcagggagttcatataatcatagaggtcttcaaatacagttgttccttcccctaggatgcaatctccagaaaacagagcattttcttcttctaagactagagccatatgatcatcagtgtggccaggtgtgtatacaactctagttcaaagaagaaatagtaacagttggaacttgtaggcttggaagaaattttgagacgtaaattattctctccttctttatggacaagacacaaataaatgatgtcaacacattttctgaaaagagtggcgtcttaactactggactgccaggaaatcccctacatgaaggtttatgaccataccaataataaaccagttaactaagtctaaataatttgttctacagagtacttgattgctcagccacatataggcaacactctctagtagtcatttttttctgttattactcctgtactttgaattgtatactttgaattactgcagatttcatgttgttttcttgtttaccattctacctcacaaggctatgaactctgaaaggcaggactcctgtctaattctaatctttatattctcaatgcttagcactcagtagtagctaatggagaaggcaatggcaccccactccagtactcttgcctggaaaatcccatggatggaggagcctggatggctgcagtccatggggtcgttgaggattggacacgactgagcgactttactttcagttttcactttcatgcattggagaaggaaatggcaccccactccagtgttcttgcctggagaatctcagggacggtggagcctggtgggctgctgtctatggggtcgctcagagtcagacacgactgaagcgacttagcagcagcagcagcaatgtcatgtttaatacgttgctgtgggttcgcccctcacctccagcaccacctcctggcagtgcctctgaaggagtgtgtgtttgtgttagtcactcttgcaagtcccactcttgcaagtacagggactgtagcccaccaggttcctccgtccatggggattctccaggctagaatactggagtgggtggccatgccctcctccaggggatcttcctgacccaggaatcaaactcgggtctcctgcactgcaggcagattctttatcgtctgagccacctgggaagcccacctctgaaggaggcttgccagataatacaggacccggattcaatttgaatttcgaataatcagtgaatccttttttagcataagtgtgtctcgactggcagacatttgggttgtttccagtgtggcgctattaagcataaaggtgtaagtcctcaggtggatgtgcttccatttctcttgggtcagtacctaccagtgggattgcatcccaaccagccaagaacaagcattccagctgctcacgtcttattaacactagtcgccctagtgggtgagaaatggtctctctctttggcttttggccagacccacctcctttcctagcctcacagccccattcaaggcttcagtcccttgatgcctggattctttagattcacatccaccctaacaatgcttctgtgtgtgtgtgtgtgtgtgtgtgtgtgcacactcagtctctcggtcagatccaactatttgtgaccccatggtccatagcccgccaggctcctctgtccatggggattctccaggcaagaacactggcgtgggttgccatttcctccttcaggggatcttcctgacccagggattgaacccacatttcctgcattggaggcagattctttaccactgagccaccagggaagcccatattgaagccgtaccccctcagaatgtgaccttacttgaaaatacggtcactgcaaatgtaaccagttaagatgagatcatttcgtgttagggtgggcctttaatccaatataacacgtgtccttaaaaaaaggggagaaatttgaacacagacatgcatttagcaaggataccatgtgtagattggaattatgctgccagaagccaaggaacttccagaagctgggagagagacctggaatggattctttccctcccccaaaacctgcagtggagaagagaatgactacccactccagtattctggcctggagaattccatggattgtagagtctaggggttgcaaagagtcggacacaactgagagactttcactttcactataacaccttcagagggagtgtcagcctgcagacacctttatttcagactctgggcctagaa

SEQ ID NO: 64480 - DNA, 1306 bp, Bovine  19866880491735
  misc_feature (1)..(1): n is a, c, g, or t
ncaccggggaaggccccaggaccagggctcaaagaggaagtttctgcgggtcaagaccctcatctccatgaaaaatgtctcgcttttaatacatttcttgtttaaacaaaccttagaggaccatttggtgccagattcttagaactggcgtacagtgaatttttttctttgctatttatgctacccagcctgtagactttaacttaacaaagaacgtttagtataaggtagcaatgtgaatgaatagttttttgtgtgcttactaaaaatgggggctccaaagaacaaatcaaaaatccattaggaataattctgcttacccagtgatggacagaaatcatgcagggaaatgggagggaattatgaaagaccttattctaaagaggcagcagtgtcaaatgtctgtcaaataactgttgaacgaaaatcagcccagacaactgctcagatgtaggaatgagccaccacacccagccctctgtgtctttccttctgtgtccaagtctctatgtttctgtcacacacacacacacacacacacacacacttcacaaataaaattcactcaatcagaaccatgtcagggcaaagctcctcttttggcttgatacgtaaactttccaataattactggtatgaaattctttagcagcaaagaacaaggtcattctctatgactcctttttgttctgaaggtaaaaacaaaggctctttaaaaatttttttttattggagtgtagttgatttacaacgttgttttagtttcaggtgttcagcaaagcgaatcgttatacatatacatatatccactctttttttagattcttttctgatataggctgttacagaatattgagtagagttccctgtgctgtactgaaggtccttactaattatctattttatatatagtagtatatatatgtcaatcccagtctcccaatttatctctcccctgcttatcttctggtaagtataagtttgttttctacatctttgactcaaattctgttttgtaaataagttcatttgtagcctttattgagattccacatataagcagtatcatatgatacttatctttctgtgtctgatttaagacatagtttctcacagtcacctaaggcccaacataatctagcagtcattaacccttccatcttttgtcatctgcttcctcccactctgtatttcaaccctaatggctttatttcagtccttcataagtgcgggactcactgccagtttaggacctttaaatgcctgaaaccctgtcttctctcactacaagctttttaaaattttt

SEQ ID NO: 64481 - DNA, 1835 bp, Bovine  19866880517846
  misc_feature (1)..(1): n is a, c, g, or t
ntccctgtttgagttttctgagcctacagcaaatcccattggctatctatttgacatgtggtaatgtaaatttccatgttacttgcctaattataattttttggtatacttaatcattttttatttttttcagtgtctcctacagaggcagaaaaatgcatagcaagtattactacaatgtgagctcccctggaacaagcataaatgatttgaattaaagttcatttggattaaagcttattccaacaaaatcctaatggaaattagaatatgctttccattatatttatagatacatgaattttaccagtattgagaattttagcacacaaagaaccattttgtttactattctgttttctttttttacttagaaccctttccatttccccaaagttgagtacaataatgaatacatacaattttatatttgtatgctattgtgttattgaattattaaagcacatccaagtttttcttatcagaaaaataagaatacaactgacaactttttaaagctataattcataattatagcaacatcattttagagaaaggaggatcaatatggtccaggatgtatgaggaggtcccccaagcataacttggaatattctctgtaggaatacataaagcctcccttttatatgtagggattttagtgtgcagattaggagtgtctatctttttcttagcagttgttcaccaaaactcctatcagctcacttatgttaaatagagtgttgttagccttctcactaatccaattccctgcagatcttcagtatatatttgataccttgaattgtgctgttcttacacgttttcttctgtaaaacaaataaatacacatttaatatctaacaaagcacttgagcgcagtttaccaaacacttaaaaagcagtgtgtaataaaatctctgagtctcaagacaaagaggcatgcaaccatgttaacaatcatgtttttttcaatttttattttataaaagggtatagctgaattacaatgttgtcagtttcagctactcagcaaagtgacttagttatacatatgctgctgctgctgctaagtcgcttcaggcatgtccgactctgtgcgacggactctgtggactctgccccacagacggcagcccaccaggctcctccgtccctgggattctccaggcaaggacactggagtaggttgccatttccttctccaagttatacatatatgcatctattctttttcagattctttccccatatagattattacagagctttgagtagagttcctggtgctatacaatattcagtacccatcttgatctcaaagctagctgagactgtgaagtgctatttccaaattttttataaaaataagagtgactagaaaaacacaaaggcttttatgtagatctgaaagggtatgatagaataaaaatctctttgttaaggtgggaaaaaatagttaccatctcagaggtatgctgctataattcatcccaatttctgttgcctcttactgttaatttactcaagtgtttgtggctgtatggaagttggccttgtaaaaggctgaattatcacttaaaatgtgacttcatatattttacatgttttgtgactagacactacctattgcgttaaaaaactcccacggaatcctgagagaaaagaaattataggcaacggagagcaacagtatgtttatgtgaaagatggagatataattaagactgaaggtgccacacctaagggaagtcatcgtccttgagctggggaagcaggggtggggatctacgcctatgtgtttacaaaagcgggagaagggagattcatcacat

SEQ ID NO: 64482 - DNA, 1725 bp, Bovine  19866880587934
  misc_feature (1)..(1): n is a, c, g, or t
ntttttgttggtagatgaaagataaggaatgtcaacataaattatttattcggtataagtatttttgctactaagtgtgttcttactgcttagtggtctgtggagtagaacgattcattttccagaatataaattatatgacacttctgtatttctattttatgtatgacttgtgataatacctttttctttgccaaaggagattttttcctttgatggatatatgaaaggaatttgttttatttacaatatggaagttattattgctctttttaaatagctggtaaaaagttcaaattgtgtgaaagagagtacaatgggagaagagtttcaattcctccacaggtccctaggcccttctttaaggggtttcttaaagtgtgaaagtgaaagtcattcagttgtgtcagactctttgtgaccccatagactatagagaccatggcattctccaggccagaatactgcagtgggtagcctttcccttctccaggggatcttcccaacccagggattgaacccaggtctcccacattgcaggtggattctttaccagctgagccacaagggaagcccaagaatgctggagtgggtagcctatcccttcgctagcggatgttcctgacccaggaattgaaccagggtctcctgcattgcaggcgggtttgcgaaagcccctaattttttaaatgggcattaaatagttgaacattttttccttacctatttttctatttaaagctcttttggagaaggcaatggcaccccactccagtactcttgcctggaaaatcccatggacggaggagcctggtgggctgcagtccatgcggtcaccaagagtcagacacgactgagcgacttcactttcacttttcactttcatgcattggagaaggaactggcaacccactccagtgttcttgcctggagaatcctagggatgggggagcttggtgggctgccatctatggggtcacacagagtcagacacaactgaagtgacttagcagcagcagagagaggtcatctggtaatgttcaaatttcctagggtgcaatatatatgaaacttgagagtctgggcccttcaatccctaaatatgtggggattttcctagatatgttactgttgttgatttctcattcaattttattttgatcagaaaacataatttgtatgattatagtcttctttaattacctgacttatttcatgtcccagcacagagtctaacttggtgaatattccatgggcatttgaaaagaatttgtaacttgcttttgttgagtgtccaactttttgagatcccatgggctgtagcccaccaggctcctctgtcagtgggatttcccaggcaagaatactggagtgggttgccatttccttctccaggggatcttcctgaccaagagattgaacacctcttcactgtgtgcggattctttaccactgtgagccacctgggaagccccttgttgagcatgctgctgctgctgctaagtcgcttcagtcgtgtccgactctgtgcgaccccagagacggcagcctaccaggctcccctgtccctgggattctccaggcaagaacactggagtgggttgccatttccttctccaatgcatgaaagtgaaaagtgaaatgaagtctctcagtcgtgcccgactcttagcaaccccatggactgcagccttccaggctcctccgtccagggatttttccagg

SEQ ID NO: 64483 - DNA, 1047 bp, Bovine  19866880654496
  misc_feature (1)..(1): n is a, c, g, or t
ntgtctggaaaactgcttcctgttctgacgtctttaaatagctgttcattgcttaaagaatgtagaccctctatgatctggcctctacctacttgtccacattgggtacaccacccatcatgattcacatcctaagatcttgaagcttgtaacttgtttttaacattcttattttgaaaatgtctaaatcaaaagccctcttgacctatatggatctacaaagctggctcaatagtaaagaatcccctgtgatgcaggagatgcggagacacaggtttgatccttgggtcaggaagatcccccggagaaggaaatggcaaccccactccagtattcttgcctggagaatcccatggacagagaagccagtcaggctacagtccgttgggtcccaaaagagtcagacacgacttaatgactaaacaacaacaacaatgaaagccttttttaatatatagaccagaaaacgcagtctttatttgttttaaccaaacatttagtacctaaaatctattcatctctctctctctctttaaagtacactcttcttgaagcaaggacatgagacaaaatatgtttatattacccctacagtgccctgttaagtgctcaatatattttgacaaaatgctattgactattattttatagacttgcatgttctttctctttggaaatagaattataaaaccacagtatttcttacccgtgtaatttgatgggaggaaagacacaataaactataaattcaatttactgacttattatggaaattgagatattactaagtaacacagataccctctccagctttttcaaaagacagatacacaaaaatatagctattgctgaaatcagtttgtgacaggctttctcagtttacttagtggaattgtagcctgtaatcccccggtaaacaacaggattcccaaggaacaagtaaatctcttaaagaaattgatgaaactgtttttgttaaaaatttgaaactttacccaaaccatagaatttaatttcagaagggaaaaaaaggtacgtagaatcata

SEQ ID NO: 64484 - DNA, 686 bp, Bovine  19866880730992
  misc_feature (1)..(1): n is a, c, g, or t
naaatatggtgaaacacagtagtaagtcattcataatcagttcctcaagcaaaaattctttttaattatttgaacattggaaaaagagctcacagagaaatactgttcacagtggattccatataagcatttgatagttaattgtcactaccagagtaactaacaggtcccaatttaactggaatggggctttcccattatggtggctttttctgtatggaaatctattatgaagacttaaagtcctatactgtgaagatcaagagagttttctgtttttatttaaatggctattagagaaagttggtccaaatattccaagaaaagccaaactaatttaacaggagagtcaagaaaaggtttcaaggtatacatggatttgacatgccttttttggcctgagggatcttagttctctgaccaggatcgaacgcacatccctgcagtggcagtgtatagtcttaaccactggactgcctggaaagtcctggatttgagatgccttatggggaatggccatctgactagtaagacacacaagtacaagagaagcaaagtcaaggcaagaggcaggacagcctgtggtcaagttacctattggtgtaaccagtgggatgctagttgggaatagtagaacataagacagggaatgcatactgtgacattatagagggtgcaatatggga

SEQ ID NO: 64485 - DNA, 1327 bp, Bovine  19866880859374
  misc_feature (1)..(1): n is a, c, g, or t
nccccggttttaacctgttgtgcaattttctgtttacaggaagatattcctcgtcagctcgtctacatcggcctttacctctttcacattgctggagcttaccttttaaagtgagttgggatttttcttgggtgtgcttatggactgggcagatagtatgctactctgtcttaattcgtaattaatcttttcattttaaatgtgttcttctaacagcttgaatcatctaggacttgtgcttttggtgctacactattttgtcgagtttcttttccacatttcccgcctattttactttagtgacgaaaagtatcagaaagggtgagtctttcaaccattctgtttcttgtgtaattaaagtctgtgcttatgttggaaaggaccatgctattgccaaggtccatgctattgtcaattatgttgctttataagctactttaaataaaatgacactttttaacaattgaagttggtattttgttctctaaaatagtctttcttagcttgagagatagtctattggaactcatagttttgaaggttgatgagggtttactcagacatatgagaactcaaagttctcatacaacttttcctatcttgtttagtgcacattgttcttttggagaaggaataatgaggaaaagtgaactttcagaagaaattgaaatagtagattatagagccttaaagatacaaaaatattttcatgggaaaattaaacttggacagcattgaagtaatatgtattgtaaagagtcttggggggagaaaaagtgaaacgaggactctcatgagaattgaatacatggcctttgtttttattcagccttttccaaaattgttctatataccaggagttctgagaatcactaatagttgtcatacacatacacagaaaatcagctaaatgaaaaaaaacaaaatatttctttaactgaacttctagaacctgaaatatgctcatatgttatacaatctccaagaatgtgatataatatgaagcatttccctagcattttatttcagaatcctttttgcagaacttaagaaatgctgttttaatatgcatttacttaacaggaatctgttttctactagaatcttatctttgcaattttgtgaatctgactttgacttttttttcacagattttctctgtgggcagttctgtttgttttgggaagacttctgactttaattctctcggtactcactgttggctttggcctagcaagagcagagaaccagaagctggatttcagtactggaaacttcaatgtgttagctgttaggtagggtgatttaacacttttctcaccttgcc

SEQ ID NO: 64486 - DNA, 1009 bp, Bovine  19866880924203
  misc_feature (1)..(1): n is a, c, g, or t
nccccctgttctttagtgacctaccccgctttctcctccccttcaaagctaaacttcttgaaaccatttgagcttcctgtttctacttttgcactttgtgttcaccactttatgaaaccgatctctagtctatcagagaagcattaacttgggcccttggtgtgctaaattaagtgaaactaagtaaagtgaagtaagttatcgtttaaagagggatagaaggcaatggcacccgactccagtactcttgcctggaaaatcccatgggcagatgagcctggtgggctgcagtccatggggttgctaagagtcggacacgactgagcgatttcactttcacttttcactttcatgcattggagaaggaaatggcaacccaccccagtgttcttgcctggagaatcccagggacaggggagcctggtgggctgccgtctatggggtcgcacagagtcggacataactgaagtgacttagcagcagcagcagcagcagcagatgctccatctagagttccttaagcttctagaggtcagaaggtcacagtcctacccttagcaggacccaagagtggtatgagtgggtcaaagtcttttcattaccagtcagctctccctgccaatcttttctaatagtaaaaacagcatattataaatgtggtctatagtttcaatagcagtaacatttatactcaagaaaattatatcatttccaactattaaagcagtgattttgcttcctcatagaaatacaatttcttcctcacagtatgagtgcaattttatattcttaaaacttactgtaaatgatttgacaatagcatgtaaacagataaatggtatgacctgcttttttttattattattattgagctctgtgtttccatcagagccagtttcttcagtgagaatcatcactttctgaaagttcaaggtcatcctggtaagtaaaactcttggactgctcatatgaagtaagaaggatctgtcagacaaacaggttgccagcg

SEQ ID NO: 64487 - DNA, 1728 bp, Bovine  19866880943388
  misc_feature (1)..(1): n is a, c, g, or t
natatattttttagtcttgcattgctgaattatattaatatgcttatcaatatcaaaccatccttgcatttccaggataaattttagtaggatttgatatatgatatttttaatagtctgtcagatttaatttacattaataatcactatattaatgattaggcatttgcatttctaaaaggattacagtgcacgttagaaatattttcaaataaagagaattgtaagagaaattatttgttggttaaacctcagtaggcatgaaaatgctatcaataaaagcatctcctttgcaagcattctggtaagtgctaaagaatatagaagtttagaaaattagagagctaaaaagaacagcagaccaaatccactcatttcacactttaggaaggcagttgaccagagaggttgttaacttggtcagagaggttgttaagttaaggcagttgatgagagaggttgacttgtgcaagatcacagcctaacagtggcagcattgactgtacaaataagttgtaataagaaagttgtcgaggctgaaagagaaaattatctgaaaaacttactttatttccagtggaacataaattctaagggagaatgaaaagattgaccaagatttgtttctgaaacagtgaaggtttcacgaagaaatgatgtaagcattttaataaattaaagacatgactgtcgtctttaagggattcaaaatattatggggcttgatatacccttgtctttcagttccaactctctcactttctctgtatgtattcttggacagttctccccaacacacaccagggaagccttcctgccaagaatgggctaagtacattaccaacagggataaaagaaacacagaacaaatgaaagagactctgaggacagatatttcagaaagtctctaacttttagaactatctggaactatacccacacatatgaagggcccaggcaaagcaggggcttctcttgttcgctatgtgtgcaagttcaggtggattgtcttttaaggtctcaaacagggtcctgtgaaacctgatcagctttatgctgaagctattcacccacttcccttcctctcacctcatcagcacagtcagcaggagccttgcggagctgcccaacacatggtgcccaggcagcgcttgacctcacgtgtggccaagggctgacttttgaggactgcaacaataggactgaaaacatctgctttgcttggataagccagtgagaaactcagccaaactgactgtttggtgtcacatagcagaacaatcaggagatgactgatttttttttttctcctagccgctgtgttgacacgacctcagattctaatctaatggtacattttattgaaggcttgctataaagagcacactttaaatttttttcaaccattaagaggctgctatatttactgtttatttgaatctccaaacactctacagcagatagaacagttaatattatcctaatttaataaaagatagatgtggttaattcactccaagtctcatagctttttggttttttttttctgtcttttcccctttcttttgttttgttctgtttattcatatcttttaagtggtggagctagacctgactttaactgtctgtctctctcggtatgccacactgtcccagcttcattagcattattttctaaaaatgtatactataggagagaaagttgtacttgttagagttttgcagttt

SEQ ID NO: 64488 - DNA, 1537 bp, Bovine  19866880991733
  misc_feature (1)..(1): n is a, c, g, or t
naaaatatatgaatatattgattgatgataaaaaacattgacacaatttgttttttcttatttctaaattagcactataaagaatctttattgggaattccttggtggtccagtgtttaggaatcttttttcccagattcgaacctggaccaatctgtgttgccccatgttcagttcttgattagagagctaagataccacaagcctcatgaaattgccaaaaaaaagtaaaatgttaaaaaaaaaagaatacaaatattgtaaaaaaatttttaagccatagccagcttcatacttaatgaaactcacaaactctccatgtagtccacggtccttgcacctcctaaaactgttaaaactttttttatagatctgtgcattttcctagttaacttttatcagagactcaaagggacagagcataccaaaaatgcttcagaggcattacatttatatcaagaaaagaattcttgctattatcaatattattgactaaaattctgggatttctggctaatgcctttaggcaagaaacagaaccaaaaggcataactatcagaaatgagaaagattagatcactgttactggagaacaataagattgtattaatttttttgaatgccaaacatagaagcatgctcaagttatattagttacaacaattgattatgaacacacagaaagccaagaggagagtcagccacactgggtggcatgtgctcaggacaaaggaatataatcatctgatgacgagtgtccctgttctttaccctggagctccaccgtaaggtgattgatctgtttgtgctataattaactcactgacagaatctatatatctcttatttgtaaacaaacttgctctttccaagttcctgctcatcaggccaaactgaagtgtttgtaaatcctgatccgaggcaaccttccttttttttttttaacttttatgaaatcaatacattaacattttttttaatttattttttttatggctgtactgggtctttgctgctgtgttggctttcctgtagttacagccagcaggggctactcttagttgtggtacactggcttcccattgcagtggcttctctttttgcagaccatgggctctaggccacacgggcttctgtagttgaggctccctggctctacagcacaggctctatagttgtggcttacagacttggttgctctgtggcatgtggaatcttcccagatcagtgatagaacctgtctctcctgcattggaaggcagaatctctactactgagccaccagggaagccctcaatacattattattagagatcatttaaaagaaccatcgaaattgccaatgaaccatacttccctctaatatgagagaaatgtaaaggagaaatcttcaccctcactgttgttcagggaaacccacactattgttcaggatccataaaactggaataaatttctgggatgtgcggtaatactgaacacagctatctattaaccagatctgtgtctactcattacctgtcagtacttcacggga

SEQ ID NO: 64489 - DNA, 922 bp, Bovine  19866881001892
  misc_feature (1)..(1): n is a, c, g, or t
ntaggaatccagctttatttttttccccacgtggttagccagtgtttcacaccatttattgtccttccaaatggaactataacctttatcttacactagacattcatatttaagattatcgcagaagtcttaattcttttccatttatttctttcaccaactatttataacacgttttagtatactctttatatatattaatattttattttatgtatttatgaatatccccttttaactagatattatatatattccgtaagatacagaaaaaaaagtactgatattaggatacaattattcttatagtgggaaaattttgacacatattattttgagtatcccaacttaaatcattgaatgttcagatagtttcttatctttcagactctgaacatgatttaactcttaacattcagtgtatctttgtttatcatctcatgtgtcacctccagagcttgacacaaaagtcagcttactgattacaatgggagaccaactgtgatgagaccaagtgtgacagggatcccaataatgagtataaggggacagaagccaatctgtcaccaagggagatgcagtgacgaaattttggtggaaagtggccatgagagaggcccaatcctctaagtgtgtcaattatgggaaccacaggaacaaaactgtcaagtaatgcaaagggttgtttgattgtatcagaaggaaaaacacaaacctgacaaactggatcctgtatcccagtcaaactcaatagagcgaggagtaccaggccctcagtatcccagtcaaactcaacagagcgaggagtaccaggccctcaggcaagtactggacttgagttcattacagcatccaaggcattcttaacaaaaggaaaagctagttacatttaagtaaggctgctataaaaccacaaatgttt

SEQ ID NO: 64490 - DNA, 1169 bp, Bovine  19866881187056
  misc_feature (1)..(1): n is a, c, g, or t
ngagatgtatcagataatgagctgtttacacaaaaaatcagtaatcttctttttccaaaaaaggtataatcaatccccattttgagatgacaaaatcaaggttcaggaaggtcaagtaccccaaactttcatagctgctaaatgtcatcactactgggatttggagtctgatctgtttggctccattactacactgtgagttgccataaagaaaacaaatgggtggagtggcggaggagagataaatcaagagtttgagattaacagatacatactactatatataaaatagataaacaagaatgacctatatagcacaggaaacagtattcaatatcttgtaataatctatagtggaaaagaatctgaaaaagaacacatatatatatatatatgactcatagataaatatgaatcactttgctgtacacctgaaactaacacaacagtgtaaattaaccatacttcaattttttaaaatgatgctaaaaggcaataaaatctataggaattccccggccatctggtggttaggattctgtgctttcactgctgagggatcagattcagtccctggtcagggaactaagatcccatgtactgcacagggcaggcaaaataaaattttaaacaataatagtaaagtctattttgtctggaaagaaaaacaaagcaactgggaaagcaggctaagtaggagcaagaagtcagcctgtgcaatccacacagtagagtgatgctctcgagtaataatctattcggtgagtaaacagatgccatccactgccaatcccggggtgcatcacttgcaccaaatcctgctgtcaacagcgcttccattgttctcaataagaacttatactgctttttcagttttctatattcacactgatttttacatgaaatttgcacattagcaatggaagcactgtgcatcaattccaaacaaagcacaaaaccaaggtctctctgagtcaaaagagattttggaagacagggtgagttaacacctgtctgggagagtttgcaaggctgtgcctggcaacagaggccagcagcagactttagcctaaggagggcaagtgtcccagctctcctggagttgtgcctccatttaattttgcttgaatttttgagatcaaatctgcccatatgtaaaaatgtcataa

SEQ ID NO: 64491 - DNA, 2487 bp, Bovine  19866880522313
  misc_feature (1)..(1): n is a, c, g, or t
nacaggatgttaaaccttcatataccacaatcctgcagaccatggagagccactggagaaaatgaagcaggacattcaaagaatagaggccacaacaggagatcactaggtattttaggtgacagatagtgagtctctagccaaggaatgaaacagaaggctggaaagagataaatccctttttaatgtatgacaaaatgtggcagtttatttggtttgggaggaggtgaagcttgaagaagaagaagggttaatgttagagtgactgctgtgttctatgatgggcaaccagttgaatgatgatgctataatacatgtgacaaggaacacaagaaaaggaggtctgagggacatagaaaaggataggatcatggtgaaagtaacagttaaaacacactgaggctaacatatgagacagcctatatgaagttgtctagaggcagacctggattggaaatttaatttaaaattcacacattattagttgaaatcctttgtgtctataaaatcaccagggattggtaaagacaacatattaaagaatgaatggaagatgaagaaagggaaaaagttagtgtgaagtaaggaaaacataaaatttagaaatttatgaaaggcaaaaaatatttgaacactccaagttaagaaatgtaatttttttaacataaagatattttgatatatttatgcagcaaggaaggaagctaaagctctcaggcaaagtaaaaagtttaactggcatttgtttattatgtctttccttattagaatataagctatataagaggagagagactttaatccctgggcctgggacaaaatttgtctcatagagttgctctaaaaatatttgatgaatgaaaaatgagtgaatgaatggaaaatactctgtgttaattgagagtgaggaaaagcatgcactcttgcacaatgctgatataaactggtccaaccccatgtaggcaagatggaaataatctttaatataatcattctaaaaatttatcctgagataaataataaatatctaagaattttccatctgtgagaagtaaatatgtgcatcaatacagataaattatgtacatctttaagtgaacacagaagctgtttatattctgatatgaaaaggtttccaaaacatattttaaggtcacaaaccagagtgtagaaaagtaaggatagtatgttactatttctgtaacataaagaacatttatgaacacacttgcttatttgtacatagaataactctggaaggatacacgagcaactggtaactgctgtaatgaaaacagaagtattttctcctttaactattgctgaagattgaaatagaaactacaattgttgatagccccaaacagtggtcatccacaaatttctttgtgatcggtaacactcccacagcttagaagaaagcaacagagagaatctatcctttagtctgttactttgtttgttatcaagtacttaggtattggcactatgtagagacatccttcagaacccatgtgctacctttcttattcaaatacttacataatgtgtacactattgaacatgtctttgctccaatatttttgaaggaaatacaaaaaccgatggtgacaactgtggttgtcttcagggaatacaaatgtatgtctagtgaaacagggtttggaaagagattctaaaatttttacttattcttaaatatttattacctgttttataaaagaatatgataaaaaactaaacaatctaaaaacaaatttattgagcacattagcttgtgtcaaatactttcctaagtactttgtctgtgtggtgttatttgagaccaggaggaatgagataaacgaaagggaaaagtctgtagctagtgaacatgtgagcttgtatgtattgggggagggggtggaaatggcagagacttggaggttttcatgtgttatagattctgttttttctttgaataagagactgtcatctgttgagtgggaggaggcagggatcatgaagactaagatgaacatttggcatagttgctatagagaataggaacggaggtgatcaaaggcagataaaagaattttgtgtattgtttaaagttgcataggcatcaatctttattgcagtgctatttttcttcagaaatgctcagtggctctggtataagagtgggaaatgaacatttttagattatatatcttgttgtgagagaatgataaagtagcaagggagcagggagttgggaatactaggtagaaaagttcttgtttagttgcctcagttgtgtcccactcctggagactccaaggactaaagccaacaggcttctctgtccatggaattccccaggcaagaatattactgctaagtcgcttcagtcgtgtctgactctgtgtgagcccatagacgaaagcccaccaggctcccccatccctgggattctccaggcaagaacactggagtgggttgccatttccttcttcaatgcat

SEQ ID NO: 64492 - DNA, 2304 bp, Bovine  19866880583067
  misc_feature (1)..(1): n is a, c, g, or t
nttcttgcagtttgaggtctggaaatcctgaggtcctgacactgacagatttggtggttgatgtaggctctcctccaggttgcagactgctgtgtcctcctcacatggtgaggagagacctagggatataactctttatatgaagagagctgaagttctctttgtttgatgttcaacattagtgactcatgtttctacatatgggttttctaaaccacataagattctgcatgagtcccaacatttgtggataggagcaggggttcttactgtgcccatcctatgcttttccttcaaaaatattacaaacacgcctataaaaaaaatactgattcctccctgggcatgatacttgctgacatagaaattcagcatttgcattgtgtgtaaggaatttggtgggcaagttttatatactattgaatatcaaggaagttctggaattttacatgaagcagaatcttatgatttttgccctatgttttcagttcaggaccatgtctctctccaataatttaaaacattagatgtagatagaagcttaacctaaagtttttaatgaaagtgacactttgtcacattcttatattttctaccttacattaaaaatgcatgtaaattagctctgaaagaagggtgcatagaaatgcctttgctctctttgacctaaagcctctgaaatgattgatgcttcaatattgtgagaattcatagccttgattttatttgtaacaattgaagtcacatgatcatttcagaattattcatatttctggtatacagattatatgatatttatagttctaatttaataacaaacacacagtttccacactgcaaatggctattaaaatcacgagaatcatggaaattagatttatttgggcttcagcagctgcctgaattccacaagataaatgccaggttatttttttattgccagaccccatacttaggggaaccatgaaaatcttggaatttcctaaatagctgtcacaaagatacagttcaatttagactctaaaaaatgcattattatgcagtttcctcattcccacccccaaacactgccctgccttcctttccctccaacccctagtattcctgccatgatgctcagattttattggcttcatatttgacataaaattctgaaaatcatatgactaacttcatcattaaaagtcatagctgaattttatcatcttaatagtgttttattacctgggctagattttgggggctacactctttgggggctacaccgatggctcagctggtaaagaatccgtctccagtacgggagacctgggttcaattcctgggttgggaagatcccctggagaagggaaaggctacccactccagtattctggcctgaagaattccatgaactatatagtccatggggtcgcaaagagtcagacacgactgagagcgttcaagctgcatctgtgagtaaatatttatgaatcacttgttatgagttcaaaactgtccttagattggtaggcatacaataaactctcaagcattgtttctgccttcagaggactgatagtggctcatgtagatgaacaacttagaagaaagatttagaaacaattcttagaagattactgtggatagatgagctttaagtgatagtgcttgttactagtttagtacattgacaagaggcctatagaccaaggaattagagatacactgatgactactagtgagttgtggaagtcaaaggagacagatgaccctggaattgagttcatggtacagacataaatttatctgaataatgactttatgagtagattttggatctctttgagtttttagagatttagataacatctaatagaaattccctgtgaaagtatatgcatgtgagtatgtatgcaaatataaaaatactatctatcattttctaccatcacctatctattcacaaacataaataggcaaaaacatatatagatatcccattaaatagccttactgatcctaatccaaaacttaaaaatatctggagagatttctcaagaaatgtatctattaattgtccatttttcagatttatgtccatatagtcacaaagtggctccttttccctgaagattttcattctttattcatgttatttatttctgtggaatgtaagatacatgtcagcctcatttagatattctatacatcattagtaagaaatcacagtccgcattccctcttcttttttataaactctgactttcgatttatttttgacactattgtatttttcagggatttcttcagagaatctcagat

SEQ ID NO: 64493 - DNA, 2077 bp, Bovine  19866880610290
  misc_feature (1)..(1): n is a, c, g, or t
ntggactgcaaggagatccaaccagtccatcctaaaggagatcagtcctgagtgttcattggaaggactgatgttgaagctgcaactccaatactttggccacctgatgggaagacgtgactcagttgaaaagacctgatcctgggaaagattgaaggtgggaggagaaggtgataacagaggatgagatggttagatggcatcagtgactcaatggagatgagattgagtagaggctgggagttggtgatgtactgcgaaggcctggcgtgctgtggcccatggggtctcgaagagtcggacaacgacctgagcgagtaaactgaactgaacttatagtccatggagtcacaaagagtcagacacaaatgagtgacgctcattttcactttcaatagaggtggggattagtggattttcagcaaggatctggtgccagttctggcaacttagtcacccaaacaccttgctctgaaattgattcaaagtcctcagaatttatcaatagggcagggagatactgagtccattaactgctgggtgaagcaggacttgtatgaaaaggttatccagcactgtagccaggatctcatgtcggttgacatgcaagcagagacaggaaagagcaaagaaaaatgccgatgcgacagactacttaaatctggaaaaaaagtaagagaatctcctttccacattgctctccatttccctgagtagccctcatgtggaataaagtcacttgtactaatggtcccctttcattaagctggcttatttcaatttctttctttctttttttttttttagtaaatggacatgtccttcataaattaagaatactccagttaacatgaatttgcacgaactctttgaattagtggcatctgtttctatgcaaataatatgctacattatatgatctttaaaaagatgttccaaaagctgtttaatagatatttcctattatttttggaactattcacttatttgttcatatatatatatatatatatatatatatatatatatatatatataaataaaatgaacttcagcccaaaggagtaatgtcaaatcattacataggagagtgaaaatgctaagattgaactggatcatataaaaccaaaggaagacttaggagaggctgccatttcattctgggccttctgtataagataaaaacacattttgatcatgtgctgccttcttaaaagtaaagtcaatagacatattctaagcataccagataataatgctatctttaggagaataagtggcaacattccctatgagtaatataagaaaagcaagcattttgaggatatgacaagcacagaattaacacaaatgtcaaggactatactgacaaaacagttattttagatgacttgtgcaatagaaaattagccaggagagatcaaagcaacgaatatccatgtgtccatgagttgtgaatatccatgtgtccatgagttgttattaaagttagtgccaaaaggttaatgacttaagtctttccctacccaggttaaagccctgttagttcctctgcatctcagatgaccttacaccttctttactaaaataccttttaaggacttcatattatgtctttccctttcctaaacagagtagaacaccaagagagttatcagaactgttgcataattaactcctaaatcaatctttcttccacttttgtgagctctttccttctaaaggagaagattgattgctaaatatggtgtttgatttctactgcatgttaaacttaagctttgatagaaaaataatggtctgtcacatggacatcttttgcaatgtaattttatcattgtattgacaagtgacatctgacaaaaagtggtaaatgccttaattttaagttgatgactcaactgactcaacccaaatggcaaaaaaacccaatttcattaggttactaagaataaaataaatagttattgattaattagattatgttagtgctttttaaaactcataaaatgatgactctgatttgacagggcttagaaaacctttcaaatacaataattcctatacattttattat

SEQ ID NO: 64494 - DNA, 1341 bp, Bovine  19866880941290
  misc_feature (1)..(1): n is a, c, g, or t
nggtgtgatgcatatcaagcagatatgccatccagcattcccatctgcactcagtaccaccaaggggccattgggacaactttatagttaaccgaggggtatggaggtggtgcttggaaacaggacctaagttaggatttaggaatggataactagtgtctggggaccaggaatatgtcagtgaaggtcttcattattgtttggaaactaatggggcagaacccatctgtcctaatgattattacaaagcccttgacaacagagaagtgatttgccacacagtatagtcctaggtagtgtcagtggagggacaggctgaaatgaacagacccaaggagacgttacttacgctgacagccgtacagctgattatatgtcaaaatctgttgtttgcattcccatcagcataggatggaaatgttggtttcctcacattttggacaatgttattacagagtgtaagtgaaaataataaaattaaatttcagtgtatcaattttatagtttaggttgggatgatttagcagaacataggaaagcaagaaaatgtgtcatacgtaaaccgaattaaggatgttgagttatgttactaatgtatgcaacttgagttttgtttaacactctctgccaaaatacactttattccctataatttaaaatgtgtatatatatatatatatatatatataagagcttattatgtacagtatatatataatagtactttatataatagtatattatataatatatgtaataatatatatatataatagcttattatgtacagttaattccactgttttgggtgcaataaaatagattttggaaaaaaaaattttttttaatgtgactggaagccaacatcccacttgagaaggcagatcacccagtggtccatgctttcccgtctcaccatgtgaagaatggaggctccatattcaagtcagaccaactgaacagagcatacctgtctgaaggatatgagaataagaatcagctccttaaaccacaagattgttgacaaggaggttaccaccgttgtgatcaagatacataatgtggagtattaaagttaagtattgactgtgtggttcatttttatatttatctcaaaactatatggaatagttttgcactgtatatatagtttcaggcaactatattgcttgtttgttgcagtttaggtgctaagtcatgtccgactcttttgcaacccctctctgcccatgggacttcccaggcaagaatactggagtgggttgccatttccttctccaggggatctgcccaacccagggatcataaacacatctcctgtattgacaggcaggttctttg

SEQ ID NO: 64495 - DNA, 1017 bp, Bovine  19866880949032
  misc_feature (1)..(1): n is a, c, g, or t
nactgacaacttttgtatatttcctggtattctggtggaaacttatcattttatgacatatgggaatagataatatggttgaagataatgtagtctattttaagaatttaacatcggtttactgaaaggcttttatgattcaaaagaagaaaagcaaagaatattacaatgaagatatgcatgctgtttattctgggttttttttttagctacatattgatctttcagagacttttaaactatatcagttaaaataaggaaaaaatatgtctttattaagcatggatgggctactacatcaggtatcaaagatatacctgtatgtgtcctattcttttaatatttttaaatactgttattcagtgtagattcctaaacaaattgaccaagaattttaggactgatgataatttattaggattcttgaaaattattagatgtgttataccatctattccttacaaatgtgaaaggtgtattcttggaattgttcaaaagaagacataggccagtgtaaggaaaaggttggaatattcaacagcagacttgaacaatcctggagaaaatgctatgtgatatcctatcaagcctttccaacaacaacaacaacagagacataattcttacccagacaagatcataagatatttgaaggctgttgtactatgaggtggtggtggttgtttagtcgctaagtcatgtccaactattttgtgacctcatggactgtggcctgccagactcctctgtccacaggatttcccaggcaagaatacttggagtgggttgtcattttcttttccagaggatcttcccaacctagggttcaaacctgcacctcctgtttggcaggtggattctttaatatttagtcaactgggaagccccatactttgaggagagaatagtaaacaagtttatctattagccagctcagataaacaggaagcaactatttcaaggaatgtgttgtaaagcgttttgaggccactcccagatcttagcaaggatacacag

SEQ ID NO: 64496 - DNA, 1502 bp, Bovine  19866880964004
  misc_feature (1)..(1): n is a, c, g, or t
natgttagtcatagtccaaagtgctaattattactaaaatttctttggaactttgcaactttgctataagaacacatgagtacacctacagagtctaaatttcatttgttctgttcatagaaggaaattttactcctaccatcttggagggttaatagccaatatttcaaatgaaatatttcaattattgctataagtttaggagcattcatttaaatgttgaatttctcacttataaatgattaatgattaaaggcttaaaataaaatgaattttgttaaaaataagaatattatgaaaagaacagaaaaaggatataatcaattaaaaaccatgccctttattattgtttagaacttaaaatgataagcaaaattctaggacaagagagagactttgtcataattttaaggtcaagagagtcttagaatttcagggaggggtatttcactctaaacaaagtctgtatgatacccctgcaatttctaattatagaatgaaaaattccttgattgctactgattgatgtacaaaacaataaggttcccagtgaattttcagaagaaattcaactctcttgcttgcacacatggtaggtggcagtcttttcctattgcaatttctaattaatgtttaaagccatctgagccagaagaaccctattctttggtcatactgtgaatatctaagttctccagaatctattcaggcaaatttgaagtcttttatttgatccttaagccccttcatgatgtatttcctgcataagactttcttacttccaatacttgaagagaaatgggaagtaccaattaggatattattttctattgattaaaacaacggattattaaagtatcatgcatttatttggaaaatgaatcatatttcattttgtaacattttctaataaaaacttgcatttgaaagcataatatgattacaaactggaaagggacattgattggacagaggttcttaaagtctacaaagttctgggcttcggggcattgaaggcttctgaaattgtaagatactttatgttgatgaacatgttcctaactagaggattcagacagaaaagacaagatggaacaatgacttgagagtttgtggtccaagcaacagacagagtggaatattccattgactgggaaagtaggatttcaggtgattctgagactttcaagtggagctgggaggtgtagatcaagtgtttagttttgtgtggattaactttgaaatgcctgttagataggttgagtcagtcagaactcactggacccaggaaggtaagaaaagcgagcaaacaaacaaacaagcaaatgcagtgttgaggtaagtaactatgctaaaaggaaatgctacagaaatccaggaacacggttatcctgagggtttgtctccagttctgtgcacaggctaatctagtctttctcccaggaacattaaaggcaaaaatatcaattttacctttgagaaagaaaccatttatttccata

SEQ ID NO: 64497 - DNA, 1151 bp, Bovine  19866881242828
  misc_feature (1)..(1): n is a, c, g, or t
nattacttcatttgccattcccccctttgtctgtgagtagaaatatttgaaaagtagaggattaggaaatagttaagggttaatggaatcatcctgatttgagatatttgtgatacaaagctttaaatagatttttcacttttgtttgtactttccaatgtaatgttttagtaaaaacggatagcaaaattccttttgtagtatcagataatgtcttcaagggaaatattgaagaattgtctcttatagaaggatttttaaatttatacatttaaaatgacaatattaattaaataagataatcaaaaattgatttatctttgtttataatttgtttttctgaagattatttgaagggatatcagaaaaaataatagaactcagataaatatcttttaattataaaatcaagggcatagaagatttaaatttatcttttatagaagactttttaagaaataatctaaactagtaaaaaaaaataatgctaaaggcattaatagtagtttatttcaagaagttctataagcttattttccgataagcaaaaggttaggcattactcaaatgtggtaagttacagaatactaaaatgttacctgtcatcatggcaatatttcagtatgttgtcatgatgagaaaactattctcttggatttggaaaagattaatattgctagctacttgccaagtactatattttaaaatatcctatttcattcttaaaatggtaaacattatcctatttttcaaatacacaaagatacaggaatgttatgtgtatgtgtcaactagtataatgcatttggtacaaaatctgcattactgaaatctaatcattttagatacagactgcaaagggtgttctgtcaagtgaaaaacatgaatcaagcaatatgaaggcagtgtgtaacctactaaattatccatttgaggttatgttcttgattttctttaagcaaaatttcttgaattagacatgaaatgtaatcaacgggtctcttaatgtgtcagtggttttccataaagttcttccctttgtttgcacagctgctttctagagacctgtatatcacatttcccttacattattgtcattgctgttttaaacctagtgaccatttccaggaagaaagttgcttgcacaaatg

SEQ ID NO: 64498 - DNA, 932 bp, Bovine  19866881486708
  misc_feature (1)..(1): n is a, c, g, or t
nttgctttctaacaagttattatgtactctctctgctttaatcttcagattttttttttagaattgctttaaacttgtaatatttctgctaaaaagcatgagtgaccactcactaacagagagcaaccaaactgactgtagactttttctaacattcaaaatcagtcacagtaatgaccaatttctcttttaatctcttctgcattctaagtagctgccaaactcattgttattttatgagcatgtcccactaaatacttccaggatgcagtctgaaatcttgatcttgccaccacttgaagtatgctcttccatatcttgtgctcaaatgttgtttctttgatattcgttgtggataaattctttataaaactttcctgatttttctcaaccagatgcagtttttcctttgagttatcataaaaatataaacaacttccatgccaatctttttcttttctattatagtgtcattttttagtttcactttttagattgtaaacattttaaagcaagaaatagtgtatcatttcctgtatgttctatatagtacatctcaatgccttatacaaaattaaaattctgtaaatacttattagattgagagtaatgtgtcattgatacataaaaaaaactgtgtactctgaatcacatgactgggaaagaatatttacaatttacctaaaggtgcaccttagaacaaaagggaatgtattattgttttcaaattattttgcttgatggtagattaaaaggtagcatataaccatgatggttcaaatgaaatgaaatcttctcagaagcatggttcttttgttttcaaatccctgtataaatatggtagataaacttatgaaattgctttggctcactgaacttgtgaagtggactaattaggagatgtatacatttagtatttaattagtataatg

SEQ ID NO: 64499 - DNA, 1602 bp, Bovine  19866881554357
  misc_feature (1)..(1): n is a, c, g, or t
ngagcctccatgaggaggtccattagagactggggaggggctgggcttgcccagtggagcttctcaactgcacaggtgcctgagcaaatccagagcacctggccctcagactctcagagcgacgtccttctgaactggagggggagtatctcaaagaaaccctgctaaaaaggacttagctctggtctccccaggcttcctgactttgtgagtgagaagtagtttccaggatgaacctcagatttcacctctagccatcttcctctagaggaagggaaagggcaggtttttttttcttgtgctctggtccaacgaagatacagtagatgagagatggacaagacggaggggaggaggtgaaagataggaccccatggcgaggaaggtagaaaagtgggcctaatggccagcccccccaccacagctgatactagtgggggatccttgagggtctacctgttccccaaggacaaacttggcatggcaggagcctcagatcacttctcctggctgggatttacaccctctacaccaagtccctgcccttggttctgctgttattgtaaggattgaggtagttagttacttctaccagagtatccatcacctgtggttactcaaaacacatgctcccaaggcgctttcagttgttacatttaaggagaaaaatatctttcttttgtcctatcagattcttttgtcctgttagatccaaccgtattgaggcaccagtaatggcaccatcagactgttccccaaggaggtgcgtagggccagggtcggggttggggtttcggccctcaccctctaaatccaacttaagtcatcaggcctcctccctctcccatgccaaataaagaagccttgtgaacccaaaggaaaactgaagttttcaggtgatgttactctaagtctaaatataagggaaatgttctgcatttaaatcatcatatatttggaagggtaatagttttatgatccctggcgttgatgcagagtttttgcaacgtaccttcaattactgggtcaggctgtgctgctttccatctgtctgttgtctgcaaacatgcaaacagttgcatggtttcaatgtcaaagccactaggatctccccatgaacacattaggggaaagaaaggatgagagagggaggaaagggttgacctgaggcacagcttccgtgaatgaggaagttcacgtggaccatctggggctctgtgaggtcccaccaaagtactggtggttcccagttgggcaccgttgaaaactaaccgatgcctctcctccctggacaggatcatttttactatctgagcagaatcttgccggtgagactacacatgaaaaccgttttctcaaacaagctactatggcagtcttcagattgcctttactgtccagttacccaaacatgtgtttgaaattactgtttcattccttggggataggacaaattgttcactgtagattagatacttaaaacacattcgttttacctgagtcacatctttatggaaactttcccaggattgaatttgcaagaatccgtgactggcatttatcatagttattaagcataataaatccaaaccaatacaagtt

SEQ ID NO: 64500 - DNA, 943 bp, Bovine  19866880522390
  misc_feature (1)..(1): n is a, c, g, or t
nttataatcataaaaactgaaattatagagcctgcaatatttacagatcaatcttaaaacgtaaacatttagtaacacaaattaaaagtagagaaaacagataattttaattaaacattaatacacttaataaaactacgtttacactgataatacttaacatataatagaaatacttaaagtgttcagtgtttcaatttttagtagcaagatacagagaaaagaagtaattgtctaatattaacttactgttggagctacattactctgaagttactatttatggagttacagtctataactactcaaagaactgggagctaatataattcaccatcttttaaaaatattactaataagatattggtgaatcctgtgctaaagatactgaaggctcttccaaaaatgagatctatgttggttgagtataccgagtcatataaaactagaatagttgagttagtctcttattctaacttctttttaagactgatcttatcaaaagaaaagtacacaatacctctcttaattctctcagatagagatattctttggaataaaaataagtatttttttgtgtgtgtgcacatgtgcagttgctcagtggtatccaactcttttgtgaccactgtggactatagccagccaggctcctctgtccatgggattctccaggcaagaatactggagtgggttgccatttcctcctccaagggatcttcctcgcccagggatcaaacccatgtttcctgcattggcaggtggattcttcatcactgtgccacctggggagcccaaacattttattagcagtgtaaaattaaagatcttgatagctattatggaaatagtatattgaaaaggactcaaaaactactggactgtacaaccaaaaaagcgataaattcattcaactaagaacagtgtttactgacatctactg

SEQ ID NO: 64501 - DNA, 1401 bp, Bovine  19866880535658
  misc_feature (1)..(1): n is a, c, g, or t
nattattcatcatggattgggaatgttctggtgaatgtatcagtgacatgagggttaccaaatagcccttcaggaaagggagtgagaataaggaggatagaaataagaggaagtgtgtctctaataatccttcatgttttaggaacctagatgtataggcaaaaacaaatgaatggaaacttaaaaaatggttttataagcaccttagtttgcttgtgtgtcacacaaagaggctggaatacgcaggaccaggaggatcttgaaaatctgcagttctaaatacagtagcttgaattttttaattcagggcaatatggtaaactaactatattaaactaattaaatattaaaggcattaatctggtgaaacaaatgagtttttcttttattctatgggtgaatttctaaattgaattataggatcaattgctactccacctggaacatacagatgtagttaaaccacagattctgttttttttttcctgctgaatttagtggccctgcagtgactatgtcagagctggacatttattgaaaattaaagactctggaaaatcaatccttacctcaaagtggtaataaatcacactttctaaaaagagtgttgctgcatcccaaagagatttacttaagaatgcactatcagtacctaacctaatacttcaaaaagtttgatacctaaatgaaattattaaatgtatattagcctttccatgattaatattatttgcctgagaggcttgaaggtgatgcactcacatattcactacggaaggtaatgagcaaatagcgtattgaaatttaccatgtgctcatttctgctgttatacagcagaaaatagcataaatgaactcatgtctttatattgaactaaggtatgtgaaatgcttcacctcttgatttcaataagtttcttattctctcgttagacattaaacacccaggacattttcttttctttttcattttccacttctttgcaatagaatttccgtaacatacttgtctctttcagagaaggcaatggcaacccactccagtactcttgcttggagaatccagtggacggaggagcctggtagactacagtccatgaggtcgctaagagtcggacatgactgagtgacttcactttcacttttcaccttcatgcattggagaaggaaatggcaactcactccagtgttcttgcttggagaatcccagggacagaggagcctgttggactgccgtctatggggtcgcacagagtcggacacgactcatgcgacttagcagcagcagcagcagcttgtctctttaaccattgttttttttattacaaattgtgatatgtgggggcttccctggtgatccagtggttgagacttcaccttccagcgcagggggtacaggtt

SEQ ID NO: 64502 - DNA, 1018 bp, Bovine  19866880549043
  misc_feature (1)..(1): n is a, c, g, or t
natgaaatatggctcctctttatgcttgatgtacctgattaaattactccagcactcttacttatacagttatcagtaagttgaatctacacacctagcctacttgacatcccccacaaaccacacccccaccagccccaatcatcaatgctggctcgccggccttggccacatagaaatcttgtagaaccatgtgacatttctatattgtgagttcttccagcaataccagcgtaccctgattctgctttctatttcccttctgttgaagagaaagaggtggagaagtgaatatgggtacttatgtgtttctcagtctgtttggtgttgaggacatttgctagatgggagagagcaagtcaaggcaaactatgtaagcaagtgatttttgaagacaaatttccacatctacacttgactcaattatagtttaaggtcatttttctcccacacaagatggaaatatacaaactcctttcatccttggaaggtaggaatatgagcctgtaggagccaggagacagcttccagtaatatgtataatggaaggtctgtgaatctcaggacacagatgttcacagaagaaatttgaagtagtacccataggaactaccaagaaaatagccttactcttcttatttcccttttgtctactgactaacctgctaaacactaccaaaccatttagcggtaaaccaaatgagatagtgttggcccctctatgcccctgctgctgcttccacaggtctttgtacagttagcagatgttcatatagatcattagacttctttcactgtttagattgtgtaactggagatgtaacttctaagcaatttccttttgcagttttctcaaccttactgggactttaacatcaaaacacaagctgtagaaaatcaaacagagcaggatttacatgttctggaatcaagactattgctcctgttttatttacttcactcataggactttgatgagggatgttttgatgagtatctctcgaacagttggaacatt

SEQ ID NO: 64503 - DNA, 850 bp, Bovine  19866880633563
  misc_feature (1)..(1): n is a, c, g, or t
ntgaatgaaacttgcaaaacagactgagtgctacaactgtgaaaataaaccagagtatcaaagcatctgttctcacgtagatgtgcttaggtaagatgtagacagctgaatggtataattgttatcataaatttcatactccattgtccttctgccagtgtaattattgttaaaataattagaagtgtcctaagtggatgttcactgccaaggtaaggaactagttagattcatgataggcttttaaattttaatcacctcatttcttcaaacaaatgtttcttacctgtttatataaaaagaacatataaaaggtaaacaaagagcaatgaagaggatgaagttataaggtacataattatattcatgcaagagcctccaaaattattgatgcagcaaggataaaacataactttagaagttctagtaggaacatatggtaaacagtttgcagaaattgcagaacataataagcatatgggtttattccatatgatctgaagcaattttaggggcagagaatatcatatcaaagagtatgctcttttaagtatcaaaatagagcaatgttaaatattgttggcctggatcctatggtggtggtggtggtataagagtgtgtgagagtgtgttaaagagaaagagactataaaaataactgagaacttaattaaaataaaatatattcattataaacatttaattggacacttaggaattgattatgtcaaagctcattggcagttagagagcatggctttgattttactaattttaattttctccatcaaaaatagccagtaatgctgagcagaaatgataactcttatttaaaaatatttaaaaattt

SEQ ID NO: 64504 - DNA, 1501 bp, Bovine  19866880802939
  misc_feature (1)..(1): n is a, c, g, or t
naatctacagcaacgctggggagaagagctttgaccgacttctgcgcaagctccgagagcggcttcccaaggccagagtggtggtgtgcttctgcgaagggatgactgtccggggcctcctgagcgccatgcggcgccttggcgtcgtgggcgagttctcactcatcggaaggtaaatttccatctctttctccctctctctctctctctctctctctctctctctctaacacacacacacaacttgctctaattgaactggactccctgactccaaaacagtgagatgtgctttggtcctgaatctcactgagagtgaggctattgctgttttcatgataaagaagagcagagcagtggatgacaagatgatgagagtgtttcagaaaaaagcgggaaattgttgctggaatgttttgtcgtggtaaactgttcttttcatttgcttctgggcttctacctctcctcctccccaaaccacatgtcttatattcctaagcatagatatcttaatgaggtcttggtggatgaagggtagtagtgaagatggaaatatatattcaggtctgaaatgtagaagaccagctgaatgcaggtgtggacatgtaaccaaactctggtacttggtcatttaatctcttacatatatgggatggcaaatagtggtgctgtcagcatgtgatttctggaattgcaggtggtgggttagtctgtgttctttctataccatgtgtagttgtgagggaatagattttcaatatcatcatatttttcataggatctttaacctaacaggtatcttgtttaatttgccttcttctaatatgaatacatgacggaactgatgaatttttccaaggaacctactaaacgtaccagaatgaaagcttcctctgatctctgactctgctgctgctgctaagtcgcttcagtcgtgtccgactccgtgcgaccccatagacggcagcccaccaggctcctctgtccctgggagtctccaggcaagaacactggagtgggttgccatgtccttctccagtgcatgaaagtgaaaagtgaaagtgaagtcactcagtcgtgtcagactcttagcgaccccatggactgcagcccaccagactcctccgcctatgggattttccaggcaggagtactggagtggggtgccattgccttctctgaattatattcctagatttacacaaaagcagcaatttcaagtatatactgacataatctctcttctttcctcaaatagtaaaaaaacatccactttcctcaaatagtaaaaatatcccccactggtaactgagaattctgaatttctctgtatcctgttttcaataatctctgtgtacattatatatatataactattttatacctcattcttatcaattacagagttaaatgaaaatattctaggtatgtgctgtgcttagatgctcagtcatgtcaaactctttgtgaccccatggactgtagcccgccaggctcttca

SEQ ID NO: 64505 - DNA, 1865 bp, Bovine  19866880972331
  misc_feature (1)..(1): n is a, c, g, or t
natacctttctgagtttccatttttcatctataaaaaatgttgtttagaaaatccccatcttgtagaattgtgaagatcacatgagaagcaattagatgtgaaagtgctttacaaaacataaagcactatatgtcagtgagataacatgctaatcaatcacttacctcattgcaacatgaggaatagaagtacaaattgaataaagcaggttgttgtatattgtatgctgcagatgtaagtcttggagatttggaattaacttccaaattctcttctgtcattcccgcttcccttcatttaaagtgtttaattagtcattggttacatggagccaaacttggcatcttagaggaaaaaaaattgtctgttccttgaaggaccttaaactattccattggatttattctttaaaaatagttgtgtcctatctccatttttttcccttctctctggacttctttcagtttttctacattaactttagaattgagtaccttgggtgactgtaatgtcactacattgttatttagagaaaacattattatcttcttttctcttaatctcacataatacaccgtgttctgaatttctacctcaatttctagcctcaatatctgcaatttaaaatggtggcatgatatttgagaactggatgtactaaagtttccttcattttaagcattcaggatatttctgatctattttgtttttcctcaaacatatacagtagtgtgctgctctttagaagacttcttgaaaagccctgatttgccgcatttgctgattcctgttgtgtattctcccactgtatctgacatcaagccaatgattttatgtcactgaacttggagttgggaagagatgcccaactggatctcatgaggcagtatgagcagctcctgtccatacctacatagtgtgatgaggaacatattaataaacttgggtttcccaggtggctcagtggtaaagaatccgcctgctaatgcaggagacacaggtttgatcccttagtctggaagatcccctggagaaggaaatagcaaaccactctagtattcttgcctgggaaattgcatggacagaggaacctggcagactgtagtccatggggttgcaaagagttggatccgactgagcatgcatgcagtgatgcagtgattaataaacttggaatagaaagttctaagtagtgtcttatcactaacttattgtcgataaaccatacttaatgtttgtatggtgttttatgcagtgaatactaaatatattcattatatgtctatccatataataattctacattttaataaaaagaaaataaatagatcattagattttaagattaacttcacctggtttttctttagttagagaagctatttatactcaccaatctcaatcttttctaatctaacatccattatatgtttaaaatatttcaaagcttaccttggtcatattctatcatctatttgctcatgatgcggttcttacttcatctcagagtgtacactattgagagaattttgcagagaaggtattttggtgtcatagtttctgagatgttatataacagggagtcccccaaacctctgaatgttgcttcattgttctttggtagacattgttgcaggagaaaaatctatggaactttcaatttgatttattttgaaggtgagctttttttttttttttccccagccaggatttttagcattcttgatttttgagacaacaataaaacttaccagtatgtatttagattgccaaagttctcatcccattttgcaaatcctctcagtttccaagtctcccacttagttctgctttttgttctctctttgggataatttcttctgtc

SEQ ID NO: 64506 - DNA, 983 bp, Bovine  19866880973754
  misc_feature (1)..(1): n is a, c, g, or t
ntttctgattcctcccacaagacagtgaactcctcaaaggcagacagaggtgcctgattttcctctgattcttcaggtgattatccagaaaggtttattcaaagaaatgaaacatcaggtatcttctatgggtccggtctattgatgcaactaagtgcctggagactgtctcctggttcagctttgcgtgtatgtagacagcatttttcttctataagaatgagcctcatttccctcaaaacatctcagtctcataatgagaagcaggtgttcttctcatttcttagatggataaattacaaaacaaagaggtgaacagacggcaaaggaaaagcaggcagctgctgaagcaggagtggattcttttttattgtgtgtccctatccagcaggtcttgcatgctgatttccttgtgaaatctgctccagtaaagcagccatttgccagagtggaagctgtgtctcttctgcaaaggacccacattcagtcgtcaggttcaggtctcactgccaagaggaagtttatttcagggcaaacctgaatttctggcaaccaaggctctgccatagagagtgtcattaattctgggcagtttatgttcagctggattagccccaaagcagcacaagctttaatgatatcatgctcataaaacaaccaacctaaggtagaagcccagtaattgcctggatatgttctgatggcttttccagaaccatctccatccttcttcaccctgctttgggccccaggagactaatccttatgaattgcaactgagtttcttatcctctggcttaaccactgtgatcactagcagaaaatcagagaacaggagagagagattcattcccagctcccttcctgccaggctgcagtggagcccctcgctctattcctctaactgggatgcagcttctttgttgttcagttgctaagtcgtgtctgactctttgtgaccacgtggactacagatgccagcc

SEQ ID NO: 64507 - DNA, 1114 bp, Bovine  19866881001664
  misc_feature (1)..(1): n is a, c, g, or t
nttatatatatatatatatttgtttaaaagaacctgtatcttttaatgaaataaactgaaatattaacagatgaaatgatataatatgtggggttattgttgctgttcagtcactcagttgtgtccgattctttgcgaccctatggactgtacccaccaggctcctatgtccatggggttttccaggcaagaatactggagtaggttgccatttccttctccatgaggggttactacttcaaaataattcagaatatgggagaagcaagagtaagaaataatattggctatgaactgatatttccaaaataaaaagtttaaaaaagtttgttggataaaaaagtgggagaaatacggaagagctattcatcactaattaaaataaatctatataggaaaaaggagaaatggttagcacttcacttcctagggtcctgtaaaaatctcatctagtgcccatccctttaaagacaatgataaagcagtgacacaaatgattctcataaatagattacttttacaaaaacactagatgacatttcattttattatttattttgtggagtaaagaaaataagtataactaggaagctgagattagtcacacgttagtctcccacttttataaacttgctttctgtccctaacattcatgattaaatggtatagtttctttcatgtattagcacaattcccatctgatcaggttacaaaagcaattcttagttggaaaggcatgtaaaaaaaatttcttggtttttaaaaattccatcaaggcagcctttactctagttggaaaaaccagctcaaacttttatggatgagggaactcataaatgaatttctctaggtgtcaattttgaaggatgtcttagaaaataattttgttcacagtaacacacttattctatcccatgctttcaatatgatttgtttactgaccgatttcctccaccctaactctctcatctaatccctctgatcaatttgcctttctttaagtatcttatacttgccactagcaggggtgcttttgaaatgctcctgttgtagcatccagttgacagcctctctttggtatggtctcaacacaggcgtcagcgcaggatgctgg

SEQ ID NO: 64508 - DNA, 700 bp, Bovine  19866881017134
  misc_feature (1)..(1): n is a, c, g, or t
ncctggtttgaatcctggaccccagatgaggagatagccttaagtattttctctagacttctttcctcctgtgcagaatgtgcagaatgggggtcataccatgcacctcaaaggattgttgtgattactgaattatgtgtattgatgaacaaagttcctggaacaaataaaaatccaaggaatggtgcctagtgtgattctctctgtttctctaaagttgtagaatctaaaactggacctaggctttttcattgactcaagagctttagattcctttatttctgtgttcctatttataaaactcaagctcgtgactgtttctttaacagcagttttttgctctccactcatggtcaccttgttccaagttgtccctagatcattttttctgtcattggtgcaaaaaaaagcagttccttttccattttatttttggactattggtgtttacacaatgcattcaaaagtctgtgtttgtctatattgagtctctctgtcactgaatcttctttaagtttcagatacttaacctattttagagttttatgtaatacaccagtttgttgtttctctaactcaaattcttcatgatatggagaaagaagctaagagaagggaaaatgtaagtggtataaaaatataaaggacatcatcattcttggagaaaagcagcatttttccatttcagttgtcacatggg

SEQ ID NO: 64509 - DNA, 1039 bp, Bovine  19866881033089
  misc_feature (1)..(1): n is a, c, g, or t
nctaagagaattgtatcatatatttttattttcataagaccttattctaaaaagtatcatttgttttaccattattcataagcttcatggcaaaaaaaaaaagcttagagagaaaaactgtcaatgttctagacatcaaaacatcatctcacccttgactttatttaaaagcttcaaagaatgcagttctgctctttggaaatttaaaagagaaagaaatttagataatctcttttgatattttccatttaaaatatttatatgtatacttatgtggagggctgaattaacaacacaaatgcagcaatgtagttagcacaagtaaggccctgttagtactctatatcttcttggactgtcaagttcaagagctcagaagttaaatgtagtttaattactgtcacaagtgggatactgtaagggtttaagctgccagagggagtcatcaaacaacagtacaattctagtggctcaaagtatcctatacaatttactatgtatgggtttagttttttgacaagaccttggcactatgaaaaagacaggactacagggcatgatctgtgccttcaagaagttccaatttgagctgggaaacaaaagttaaatctcacttaaaacaattaaagactagataaatcaaaggaataaaagtgcttttgatttcatggctttccttctgtcttaccggtggattttacttgatgtttctgtcaaaaagaagtatggagcttgaagacttaaggagatgaaaagaacatttcatcaaataacggtttgtctttaacctattaaagttttattctgtctattgattatttctgcagctaagtagatagttaaaaatcaaacagattttttaaatgtatgttgaagttaaagccagcatacctattcgtcatctgaaggtgaccgtctatgaagaaaatgagggaaaagaacaaaaagggccaccaattcaggggagagctgaattggctcagttttggagttgcatgaaacccaagaggcatctctaattccaaacagcaatttaaaa

SEQ ID NO: 64510 - DNA, 823 bp, Bovine  19866881128240
  misc_feature (1)..(1): n is a, c, g, or t
nattatcttccacaatgagctctctttagcttttcaaagacatatggattccattaatatttatactgtcatttataaagaacaattcatttaacaactttctcttcataattattataccttttaaagaaggtacaatgactagactataataaaagcagatgaaactgagctattcattataatatctgttttcttttcactacttagtgaaaaaaaaagattttttatagtgaaaaaaaatatttttatgtctttcccagaccaatatggataaaatatccatattcaataagctatgcaaatataagccaaatatggaaatacccattctttgccacttgatggcactaaacaaattaacaactagacaaattgtactggttcgatactgccaaactaattttttccaaaaaaacacatgtagaaatgaaaaatgtatgggatgatcaggaaaaaaatctttctttctcagaaaactgaacctaaaacacttctatatatatatatgtatgtgtgtgtagatacacacacacatatatatttcatgtatatagtacacaaaattgaaataacatgtttttaacaccataatcagtgaggaccttaaaatatacactgtatatcatatatatgtatattcgcatgtaatatgtgaatccctttagagtttaatattaattttagatttcatttagaagtcatatctgtactatctggtctctaatattagaagagtttaaattatataagttaaatatgtaatgttacttttaaaaatgtagattatttaatatactactagaattaaactagaaactaa

SEQ ID NO: 64511 - DNA, 767 bp, Bovine  19866881139318
  misc_feature (1)..(1): n is a, c, g, or t
naacaaagcatccaatctagtcttatgtctagatcttcacacatatttatttgaatcatattttataaagagacatcaatttttgtttcactgctggtcagtagtgtaaaagatacaaaagctgatttaggctatttttagtctagtttttatttttaacacactatataagtacaattggttaactagtgtctggtcaaaatatgttgatgccagagtatgtatttagtaaaaaaaattctataaaaaggattcttcatgtctagaaccagaagagctcttacagtaattcactgtaatttacctcctcaaagtaccacaggcctatataaccctccagagggagaggctgcagttctaaacagtgaccacttccattgtcctaatgctacccttgtcctacttctatgcttataaacatggcactatttttaccttgaataatgcatggcttggtggcctgcaatattaaaatagaagtccgtcgtgtgcttcatctcattggtgtgcccagtggccctcgatccagtgtcctattgggagacaataaacaccatccaccaagttgttttcattgtaagtacagcaacggtcgtggtgaggcccgttgcctagaacaagaaatgacaaacaaagcaattacatcaatgctttgcttcaacagtcatagagttgctgatgcaaaattaatagcaagacaaaaataaatacaaagctgcataatctacacatctcagtataaacaaaaatagactaagttggtgatg

SEQ ID NO: 64512 - DNA, 889 bp, Bovine  19866881156147
  misc_feature (1)..(1): n is a, c, g, or t
nggatcaaacccaggtctcctgcactgtaggcagattctttaccatccgagccatcagacaaagtttatcgatctctataatgtaaagaaaacattgtgtatttcacaagaggtatatatgaattgctgtggggctcccctggtagctcagacagtaaagaatttgcctgcaatgcaggagacctgccttcaatccctgggttggaaagataatcctggagaatggaacgaatgcccactccagtattcttgcctggagaagtccatggacagaggagcctggcaggctacagtccttggggtcgcaagagtcagacatgactgagcgacttaaccaccacaaccaccactttgcactttaggaagatttttctagttctgctcttcactgactgaaatgagaaaaagttaaagaatgagaggatcgaaagaaagcttgctagaatagtaaactaataatgatagtgatgaaaatggaggtaaacagatatcaaagatcacaaagactctataagagactggtactcttgatcttatgtaatattattctctcacttggaatcttctttctagttctgaacaacctgccttttcttttagcaccatgacaatggaggaactgctgacatccctgcagaagaagtgtggcactgaatgtgaagaggcgcatcggcagctagtctgtgccctcaatggcttagcaggcatccacatcattaaaggtagaaggtgatgctttgttatctttgattcttctaaatacttataatgtaaatcaaaattataattatagttataatgtaaatcacagtctccccagaaagacactttaacacagtattaatcataatttaaataggtccaacttaatgggagagcagttatacag

SEQ ID NO: 64513 - DNA, 1002 bp, Bovine  19866881177253
  misc_feature (1)..(1): n is a, c, g, or t
nactattaagaggagggtccggatggggaacacatgtatacctgtggtggattcattttgatatttggcaaaactaatacaattatgtaaggtttaaaaataaaataaaattaattaataaaaaaagatgtatataatgcacctttaataataattatcaggtgaaaacaacctgtatctatttactaatgttatgagtaaggtgagtgaagtcactcagtcatgtccaactctttgcgactccatgggctatagcctaccaggttcctctgtccactgaattttccaggcaagagtactggagtgggttgccatttccttctccagggaatcatcctgatccagggatcgaacccaggtctcctgtattggtaggcagcttctttaccactagctccactccaattaagaagaagcccatcctgtcagtatttatcatacagagaaccaggaggctaagcacatgtcttcagggaatatttgttatgcaaacccttttccaaataaacacaaccagcttgtgtgcttgtgtaaatctgcagtgacacatgtacttccctaccaccagtccccccggtctgcacttgaaggggatgtgcctgttgtcagtaagaagtctctttccagcttctaccccagctcagaatgaaccagcatttggaaaggtttggcactgagttagaaaaatcacatggcctttacgggaccattttctttgccgcagcgatggtcccagatgatgttgcaagaattcatcaacaaacaaacagaatatgtgacaggttttcctgttgtccaaagatcctatattttcatgaccagtgaatacagaatccaaactaataatattgtcacttagtgggaaggtgaaatcactctgactcccaggagtttagtgcctttttaataacactagtctcagagttattagtgaaaaggggattttatgattcatttttctgtggtgcgttaactgttacaggccactagggtatcattaaa

SEQ ID NO: 64514 - DNA, 1040 bp, Bovine  19866881214780
  misc_feature (1)..(1): n is a, c, g, or t
ntattttaatatctaggaatgtataaattcttaaatattgtttaaaattacttttagttcttcttaaaactgttttcatacatgcttaatttcccgatcacaaaaaattgataacatacctttaaattagaaaaaaattgagtgtgcatgtgtgcacccatacacgcatatgttaatgtgtgttgcatcctcacatatagtccaacggacttctagctctgtcttttattgaccaaagcttatatttgactttaaattgcttatttttatcttttttatagatcagaaataagaacagactgtgcatatcgttattttagattttgatacattattttaagtggaaattgaaaataatttctatcatatacacctgccttctaaattatccacatttctaagtgattttaggattctgagttcactgtacccttacttttaaattttcattagtaccttttttaaacttcctgagtgtgggtaaagggaatttctaaaaacctaaatgtttagctagaagttaagagagcttaagaaagaatgaatgtttctatactacttttttcacatgtctttccctcctctcttgtataaagtttgggttatacattgtgtccttatttcataaaagatacatttccctaaaaagaaaaagcattctattctttacttaccattcagttcagatcaaacttgaccaaggacataggttggagatccttgctttggttcaaagctgaaaatatgcacttttaagatctcttcctaccatgtgattctgatatagatatgagaacccctggtgtcatgaaagaaaattgctatgggttgatttgttgaaatacaaattcatagcaggtaaaaggagaaggaaggtaggtagtgctgagactaaagcaaagacatatccttctgaagcaagagtggggcttttctgactctcagagacaaggaaatttggctgaaccccagccttgagtgtttgagagcccttctcaccaagtcagtaacttctgacatatttttttccttgcattttc

SEQ ID NO: 64515 - DNA, 1258 bp, Bovine  19866881244792
  misc_feature (1)..(1): n is a, c, g, or t
ncagtagatgaagaagcaaaaattataaataagcaatgaaaacaaaataagtaaaagtgggtaatagtatatgaaaaaaatcactgaatctcagtaattatgaagatagtacagttaaaataagatgctattttttcatgatactatttatttatcagattgtcagaatttcaaagattcatgatgttcattattggaaaggcacaaatacattcacttttggtaagagtagttcaaattttagtggacagtctggcattagctttcaaattttttcaaggtaaatatcacatatcacatttattgcacaatatatagcaagagttaagtaaaagaactttaaaacaatgatactatccattaagaacttactattgaaatctcaatgtctataaaattttcatggacattgttgaaatctaataagattatcctgtctttttaaaaagaaaacgttcttgtttcctgttccataatactaaattaccaaattaaagtttttgcctcttcttttaactaccttcagtggcctcatacagtccagtaaaacccaaatggaagattgaacacatgacaaaatcctcagctccctggactttggaagcatatcatggctcagacaagaggcactaactgataataaggggaagactgcagctggcaagtgaatggctcatctgtctgcagcagagggtgcaaggaaggaagtcagatgccgcttactcacaacaaaggcaggttcagaaatctatgaggtacatagacattaccagccaactctttcagccaaaggcactaaaaaggcatcataaaatggtgttacaagggaagcaactcaattgctagggtctatctttggactccgatcacagaaaatggttttactcttttatcaaaacacaagcagactaaatgagcaagaatattctatgcattcaaataagaaaattcttggttttcagtctagtaaaggctttagacatactctatccaaactcttcaggctacagcaaggaaattgggccaagtaaaatggctcaccaataggcaggaagcttctttgtgttagaattggaacagtctgccttattcctaagttactgcttgtatctcttttattttttggacagtttgaaagaattctcattgaccaacttaatagcaacaagcaattaaacatgtatgtttttataatttttttaaaggcatagtttaaatgcttctatgacatactgtttcaattgtttattcatatttt

SEQ ID NO: 64516 - DNA, 1106 bp, Bovine  19866881262251
  misc_feature (1)..(1): n is a, c, g, or t
ntttccctgggggctcagagggtaaagaattcacctgcaatgcaggagacccaagttcaatccctgggtcaggaagataccctggagaagagaatggctacccactcctgtattcttgcctggagaatcccacggacagaagagcctggcaggttacagtcaatggggtcacaaaaagtcagataggactgagtgactaatactctcactttcacaggctgaaaatatcaagactggttaaagctcaccagtcttgagtcatgtgctgaatggatgcttgggagaacttgagttattgccatggcttctctgcagcccatttcaatagtagggctcctcagtaaatttttgttttgttttgtttgttatcatcaaagcttcttattccctgattctaaattttgtggtaaataggctcaacattatcaattctgaaaatccaatagaatacatttctaattcaatcctttgtctcttggaacacatgtttaaatagtgctcctagcagtttgagatttgctttggaattttgttttaaaggtatatgtcctctcttctcacaccttcatgaagtttagtacagaaaactggtttaagcatgggtgatttgactattatggattcaaaaggacataaaaacctaacacagtggttttgaaatacaagccaattgatcttcatttttcataaaatatgtaaatataatttataaaatttgatgtccacaagctgtatgaagatttgcagaggacagtaatgagcaccttcaacaccgtacatctaaattaaatatgacattaatggaagccacttaatgcagatcagctctgctctgatggccattttaattggattgctgctgctgtgaatggaaaagctgctgacaatgttagaaaaactgggcttacagtacagtaccacctatggagatgttgaatttgaatttgtatgtataatcagtcaaatccactcatcacgtccctctttcagaagtgcaatttgattccgtgcttggccaaacacacactggctcattgtcagttctatgccttatgttcgatcacaaaagtctttttcctgacccaaacttcatatctgcctgcctg

SEQ ID NO: 64517 - DNA, 1463 bp, Bovine  19866881271036
  misc_feature (1)..(1): n is a, c, g, or t
ntggcagaataaccttttcctaaaggtgaaaattagcattattttttgtccacaggaaagaaaaaattaggaaaactataggaatggtgacatcaacgtaggaacataagcttttgtttatttctcatcacactaagagatacagctcttgaattgtggcaccctattcttagccatatagacacggaaccatttcaaagacagagaaaacagattttgctgaggttcttcacaaaatccagcttaagaatttaggagcaaaaagaaaaatgaacacatttcctaagatggataattgtgctacatttaccttatttaatattttgtgggcaatctgatgtgaaattaaaatgtgatctggcttttaaataatgggtgaagaaaaagtctgtcagtcctataatttagatctcattagtgagaaagcaagagaaacattaaaatcaacctccagtaagctccaagcttcattagcatgtacagctccttccactgaaaatttgttctctggtgtcaggtgttaagttattaatgtcaaatttctaccccaaaagggtgcttgtaacagatttcagtcaaggctgaataactgcttaaagacaaattctaatttagtgagtgaggctaattaacttcttcaataaaaaataattttattattgcttatgggtcatagacggcagagtatagagagcatatgtgaattttgtgcagttagtctcttagactttttggatgtgcaatggagtttttagccacatgaagcaaacattttttacatatgttcttttattttctatatcataaaatgccatataagtaaattaattgtgaaggtctgttatgggttgaatcacatttctcccacattcctatgttgaagtccttaaccccgtgcaccttaaagtgtaatggtatttggagataggttctctacaagaagtaatcaagttaaagtgaagccacgagagaaggctaattcaataggaatgttgtcataagaagagaaagtttggtcacatacatgtatggagagaagatgatgtgaagatagaatgaggtttcgatctacagccctccagagcaaatcaatcttatagacacattgatcccatacttttagtctccagaactgtgagacaatatatgtttggcatccaagccctctggttggtggcactttgttgttggcagccccaggaaatgaatacagggtctaaaattcaaaggtaaaatatatacaattaaccagactcttcaaatatccatatatcaggtgcacataaagttaagtattttaatagatatttttcaacttttcatcctgatgttcagaattctacaaacacaactaacattttggttatggtgccaaattattctcttacacacaatactgcccaccctccctcctttattccgggtccttcagtccatcacttgagcacttataacatggcaga

SEQ ID NO: 64518 - DNA, 911 bp, Bovine  19866881303271
  misc_feature (1)..(1): n is a, c, g, or t
nctgtaaaagtgagaatttctgcagaattgcttgagggctggggaagagctggaggaaactgttcctaggaaatttaatagtttacactgtagtttaacccacagtattgacattcgccaaaagtttgcctttggacactttgcatttgctttctcttgtgcatgagctgtataatccttaaaaattatttggtacttggaatcattgttctgtatgaaaagttcatgtatatttgaacaagatggtagtttttatgtgatgtagatctaagtaaactctacttaggtactttaatcagcatttctgccacatagagtgctcaccatacaagctctggtaactgacagctttttatcagagaccaaatggtaatgggaaaatgctagaggaaaaacttttattcagacttcattgtatgtctttattctgtcttctttgcccagtctgtgacctgaactgaattaataagtcatgcctgttagcacagtggttctcatctggaggatggcgtggtctagggaatgtatcagtcagctggggcattttcattctacccatacatgaatttcctttcctctttgaaaggacacattgcagcctcctgctaataagagccccatactagaagacagcccattgaatatgatgttcagtatctagtgtgataactattctgtaagggaaaatgcatctgacctgaagcctgggcttgagagctgttttcataagtaaacgcaatcctgcatttttcttgtgtctctcttctcattctctcccatcaggctgcagaaatggctcagcgcttgagtgggattaaccgctggtgcatcagtggcactccagtacagagaggacggaaggtaatggatggtttcctcacatatcgcattatttaaaaactaaaattttt

SEQ ID NO: 64519 - DNA, 1195 bp, Bovine  19866881315869
  misc_feature (1)..(1): n is a, c, g, or t
ncagacccaggtgagcagacacctcgcggcgggcaaacccacccactatggcagaaaaaagtcccaatctatgggatttttcttctcgtcccagaggcatcctcgattatttatttcttctagtcctgcctccccgggaagcctcggaacccatggatgcctgggctgtctttcttcttttgcctgcctcaccttctgtgtgtatgctttctccctgcctgttcccttagctcctttctcgtccgactctcaccttgaaaaagggagccggagagggacgagagataaagagagccaacttcagccccgcaggcggctgagatttggcgcctctgtccccgaagcggtagggtttgaatataccttcaggagcactagctgcgaggcgaagagaatgaggatggaggggtgtaggggaagcgaggagggatgtgtgtgtgtgtgtgtgtgtgtgtgtgtgtgtgtgtgtgtgtgtgtgtgtgtgtgtgaagaacgcagggagcggggtcgaaagagagaagtcgagggttggcagaggtgggggtgggggttaaagaattgcaactcgctggtcagcaaccggctctgcgggagattgtctcggcagcttgaccaagcactgtccagggttctgaaggctgcagggctcagctgccgccgcgggaacaacccggaagctcccctgtgttccctttctagcaactatgcaaagccaaaggtcctgatgtagggaagtgcagggacccctccattccctccctccctccctcataggtcgcaggaaactagttacccgaccggtacccttctcctcctcccccaaagtctacagtaagatgacttctgggggatgggggcgatgtaccaaaatccgacatgtggagactttaccaggcgttgccttagtaactaatatggatttcctcaagctggcaaatttatatttactatttgggtagtatgttagggtctcttcagcccctcaaagttaaagtagaaggtgcactcctggttcgagtttatttggaagtagcgcttccaccttcataatgaaagagtttccaaatttcttctggggaaaaaagttgatcttttcaaacctggaaagttctctaaggtcggaagccctagctcctccttctcccgcttccctcctccccctggagtctttaagcctggggtatttggggacctg

SEQ ID NO: 64520 - DNA, 1109 bp, Bovine  19866881613967
  misc_feature (1)..(1): n is a, c, g, or t
ncttagtttgtggtatggtaaaaaaaaaaaaaaaaatgcataggatgtagaattattattactagcagcagcagcatcattataatattatagtatcttgcagtgtttctgcttcatactgtattaagcacttatttattttctagtttaatactatattaacagtatagattagagttattattgtctttatttcatagactttatagaaatttgaggatatagagttcaggaatatagcacagaagctgtcagtatttccaacaaattacagattttgtgacttggtttttcttctttttgcctcttaagatcttgcttttcattctaagctccttcttttttatttctccctacttccccaaatattctaactcaatatgctctaagtcagttaaaaattctgaacatagaaaatccaagggaacctctgtgatattgcaactgaaaaatataatagtttataattctaccctaacctttcatctcaaaataatagtaccttcagaaaatacagcatggccattctttgcctataatcacattgtgcaagctggcaatgttctacttgccaagattcctttctatttaaaacagatttgtaatatcactctatttcttaagtgcaacaagacacatgaagttgaaaggcttacctcaacatttaccctccctgtacttctgcccctcactttctgatacttttgagagtaaagtatctattactcatcagaaacaccatgcttcagtgaattacagcaggtaaattgacaataccagttggatttataaggtaaataaacagaatcctaataaattgatactctcatttcaatgacaacgcttctgaccttaacatcttcctttcatgaatgaaatacactcttgcatcccaaaccatcatcctgcttttgtaacttgcctccaacccatttttgatgaacctttgaaatctatgttttctctgaaaccctctgtagtagaagaaacaatattttaaatgcctggagccatccatgaactgttaacctttatgtgatgttccatttcttctttgttctatgaaaccaaatttaaagtacaaagaagtgaatgaagtcaggagaaaa

SEQ ID NO: 64521 - DNA, 1068 bp, Bovine  19866881629836
  misc_feature (1)..(1): n is a, c, g, or t
nctgatgctttggttttttcatgtgtaatataatcaaatgataagcaatgtatttggaataataaagaccaagccatgggccagtcactgagacaatcaaagaaatgcgtagtagtagcaatctcatgcctgactctccctgtgaggagaggcactatatgaaattgacaaatacgtttctcatcttctttctctctggggagctgtgagtattcaaatgacagagtccctgtgttttatgtgtgcacatttaccttttctcttggaaaacagagcaaaacagaatttgcaaacgataatttcagatacattatgatttcaagtagcactattagctgaggtaataataataaataatacccttcaataaaagaatatcattcagcaacttttccaggtttaactttgaggcttaaaagaaataatgttgaaaaaaatataatagtttgcaatagattaaataggtctgccacaattggaataaaatcatcattgttagtgcttaaaatatgtgacagtttttgaaaatggagctcgctttctttgctttatctgcttttcattatagtgagcagatgacaataaaggctattaaatggtactatgtttgattttggtctacagtaccaatgaagagaacttcttcttatctttttaaatattttatttaaataaagtaattattgccagtgtaaaatgaaaaaaaaaaagacattacttcatataatctttttttggacaaaatgagaaactctggcccattagtaatcataatgcatgaaaacctcacatgcacttggagaaaaggctttgagcagataaacagtgacattcagctattgaaagcagaaatttactgaagctagatgacagaaaatacaagaagaacccatttttctctatgaatctctttgttttagatcagctgtaatatctacagtcagctttcttgtctccatctatctctatccatactctttgtttcattgcatcaattatttatgccttaaattataggtcttctttcttcttttctcttggcttaaagaataacttcaagcgcaaatg

SEQ ID NO: 64522 - DNA, 1161 bp, Bovine  19866881707237
  misc_feature (1)..(1): n is a, c, g, or t
naaaagtctgttttgctggattcattccgtttaatatctccaaagagaagtttactacctggattctggagatcttgagcagagtgtagcaaataggtgagctttggaggggtataaagatggcctagtgatgactaaattctgtactgagtaattggagtgtaaagagttcattcccttatcttatctctctgggtcttgcttacctgctaataatggaactgagttcatataggtatttctgagtcttacatgtgcttcctcctgatgaggtcacctgcctgggatatctacttcttttactcctctctttctctgcctcacctcttctgggctctactgatgtatcctaaggataccgtaatcacaacaagcacctgtgcttctaaggacacttccctgtacaatagtcactgccagtaaagcttggaaccctggagatgtcaaagctatggcatacagtgcttttctgattttctgggctgtataccatgagggtctatcaaagtggcttttactctcatatattagagaatttggtggaaaacagccttttcccattctttgttcacagctctctcccttccttgggagagatatgaatccagatatgagtccagagggagctgagctggcaataaagacgagaagtaacactacggcatacctagttagcctttccttcagaagcttgattctcccaattcctgtatgatgaattctaacccaaatactcccctgttcctcatgccaatgacatttgattagcttggttccctaatttttgcagacatgtccagaagggttccagtttaacaccaagttgcaacttctagctacatttgtagtgctgtcaaatatatctccttcccatataaggggctttaacttaccaaatactaaactcctttgaggtcaggagccactatttagtttctttcacaatacatggtctaattttggatgctgctgatttcagagaagacattgtgtagatggcgatgggcctcttttaatagagatgaaagtaagtaattatggtgtagactgcagcaagatacatttagttaagaaaaaaataacagaaattcctaaatggagatttatgttcctttgcctccccttgactcctcttttctcttacatgtcacatccaacaca

SEQ ID NO: 64523 - DNA, 3494 bp, Bovine  19866880523562
  misc_feature (1)..(1): n is a, c, g, or t
ntgcaaatcgaaccctaggaattgcccaaaaagagattaagggaaggccaataaaacgtccaaaactacagcccgccccaccttcatatttgtctgcctagtttccctccccaccatttccttctcctgaactatgtgcagaatcctcaaattgaaaccaccatgccaaccagactccaaacacttcctggttcatgaactgcataccatgtccctttccaatcctggggtctgctgctgtgctcagttgcgtcagtcatatctgaatcttggtgagcccgtggactgcagcccaccaggctctctgtccatgggattctccaggcaggaaggaagtgccatctgggtgcatttcaaaggacttcccaaatccaaggatcctatggagagagtctccaagaactcaaacttatcttggatacctaatctttcctgacgtgtatcagaccactttttggtggggccagaaaatgcaagcccttgccttaaagtggctaacaagcttgaccctgaaaggaatttaaaaattagtgaaccagaaaagtttaaaacaaaagaaaatatgttggcaaatcaagtgaccctgatgttttggatgagttagagtccctgagaagagtgtttcaggtaggagaatactggaggtcagggagttgccaagatgcctccgggtgcctctgtgtcgatggcaatagtggataggaaagtcgaagcaaccacagccaggaagagaaatgtaaccaaggatcagatctctcaagaaagaaggtgtgaatacaactgtgagtgcatccagagtggttggggagccaggagttgacatatttcagtcatgccttgagacaacccacagccatgcagcagagattgtacagtgtcccataaaccccctcttttatgtattattgtcttttaagtctgttaacaagtgcgttgctacatgcatgctcagtgtgtccagctctttgtgaccctgtgactatagcccaccagacttctctgtccatgacattttccaggcaaaagtactggagtgggttaccatttcctcctccagaggatctgcccgacacaggttcaaacccgtgcctcctacgtctcctgcattggcggaaagtttcttcaccactggtgccacctgagaagcccctgggaacatatacttttttttttttttggtaacatatacttaacgtaaaacttaacattttggccattctaggtgtaccgttcagttgtgtggagcacattcacgttgccctgcagccatcaccaccatccctctgcagaagtcttttcatacttccaactgaaatgtcattagacaacaaggccccagccccctgcccagtccctgatgaccaccgtcctagtttctgtctctgtgcattttgactgtcctagggccttcaagaaagtggatgataccatatttgtcttttgtgaatcgtttatttcacttagtgtggtatctccgaggttcacctgggttgtagactgtgtcacattcgcctcttttccaaggctgaattgtacagcccattgtacagagggactgcattttgcttctgtttccattcgtctatggatacttgggttgctttcccttttagctgttgtgaataaggcttccatgaacatgggatatctctttgagctcctacctttaattgtctggggtatttacccagaagtggaatacctggatccttttatgtattttcaaagtcattagccagacatcaccttgaagaggaagacagagtggatttagtgtgattgcagttggatccgggtggtgctgggggcatcatctgtgacataagtgtcatcctatgcccaacacagacttgttcccgaacaaataaaccacctgtgctcaagccctaatctcaggttcttctttaggataaccccaaaggaagaagacagtcaaaatctccacctgttcatatgagtgggtaagaattgccagaattgtctctatatcaagagccaaaaaatcagctttgatttcagtttgtggatttaccaaccttccagaatttagagcttctgaggatttttcaatagagctctgagggattattacacagaagacactgtgctttcatcaccattgtgttgataaggaaaggcaacagaaacatgcaaagaaatctaacaaatgaaagacatgcatgtgcacttatcaccaaccaaagaaaagtagatagctcaatatttaatgctcatggcgaccaggttttacagctgtttctgaattcatgatgcagatgtaaccttgagatttccctaaatcatacacttataaaatgtacagagtcattagggtgttttttgttaggctgtaaatgctcaccagttgatatttcacacctaattagcttggttttttcagagtttgtagaaacctccaagcagtcacacatgctagaagacttactttattatgtgcatttacattttgaaatgaaaaggtcatatgataaaaatggtggatcttaataagctgtgcttaatttcatattttatcaccatttgaaacatccccaagagtgaacaccaaaggactgtcttaatgtttataattcctatggtttacattttaaattacagtgattcatttcattttagacaacttatttgtcaaaatgtatttgttgaaaccctgacccccaagattgtctgtgtttggagataggatatttagggagataattaaggttaaatgaaggcaaaggcatgcatgctaagtcgcttcagtcatgtctgactctttgtgaccgtatggactgcatcccaccaagctcctctgtgcatgggattctccaggcaagaatactggagtgggttgccatgctctcctccacaggatcttcccaacccaggcattgaaactgcttgtcttatttctcctgcattggcaggcggactctagcaccccctgggaagccccaagggcgtaagaggagggtcttagtctgttggggccggtgtccttgtaagaagaaaaagagacaccacaggtctctcgttctctcttcaagcacacagagaagccatgtgaaaacacagcaagaagaaacgtctgcaagccagggaggacgttctctcctgggggccaaccccactgccgctgtggtctcagacccccagtctccagaaccaggagagaatggaaggctgtcgatcaagccacgcagcccatcacggcggcctgaactggcaagcttcactcttgcagtgtgtgtccctgggcacaggcagtgtcacccaagtctgcacacgcccaaagcaccaggacagtagcgtcgatgcggccggttgccggggaagccctgtgtcctgcattcagaccttttcaggaaatgtttgtggagcctgcagaggtgtgagctccacattttggagatgaccagtcagggacctcactgttttgctcccagggagctcgagtgtgtgactcacgttttctcaacacgcccatgaca

SEQ ID NO: 64524 - DNA, 680 bp, Bovine  19866880803438
  misc_feature (1)..(1): n is a, c, g, or t
ntcctctctgcgtgcgtgttgtgtgctcactctctcagtacgtgtctgactctttgtgcctcgccaggctcctctgtccatgagattctccaggcaagaacactggagtgagttgccattcccttctccaggggatctcctccaaatagggatcaaaccggcatctcttgcgtctcctacactggcaggcgggctctttacgattgcaccatccgcagtcagtgaattacattcctgtcctctctgcactttgttttgttttttgcctggaatgattctgcaataaattaatcataatctgttgtaaatcttttcataaaatgggagagatacatggtaacctgaagaatctatagaaaattacgtttatccatccttctcagggttcattagatacttagtttttggcttttaagaaaggtttcttcatccaataaagacattaacataatctcattgcatttattgctcccaaggataaactaacaggggaggaaagcctccctggcagatgctccataatagacgtcgctgccaagagaagacgcataaatgctttcatcacgattccagggcagaagcagctcggaaaggctggttgctgttctccccaaagtcaaagattggaagagtttgtggcggctgtttatcgaccatttttctccctgactcctcactgt

SEQ ID NO: 64525 - DNA, 1088 bp, Bovine  19866880945975
  misc_feature (1)..(1): n is a, c, g, or t
naggagcctggagggctacagtccacggctgaacaagcacgcacgttactcctggagcacgactgttctagtaagtttcctctttcttcaaatattttggagacttttgccattttctgttcacgtactctgagtagacctcatgactactatccactctgtaggatgctcacctggtacatttcacctgcactctatctgatttattgttatcatatttcagaatgtggagtaggtggatgaacacaggaagcggctgatcatttgtgtggtctccagtccgctgagcaaagccagagaacgttggtcagaaagaaacaacaggggcagatggagggcattggctaaggaatgtctaattctttgatattaaatgagcaacttgaaatatacatcgattacaaattaacgtgcatttcgatgataatttccgacccactggctgatatcgctaccatccacctgagatattgctacccctgtggtgtacatgtttgtttaaaactagtttcttctccttcctgtcaaaagtcagtaaaagggatgggaggagtgggtgggtgaagcgtaaagtgtgatgaaatgccaacatttggttttaactgccaaggcccccagattggcctcagaaaagcaaattaaacccactccaggaatcactgcatattaaggagaaactgcagcctccgggggccaacgtgatccagtctgtgacaatgcagggctttaaggctcttgcgtaggaaagaacaaggcttggggttttccaaggcaggatgtgtgggttgaatggctttttatttgattttttcttaatttcctgactatgcaggcaacagttgtgagccctgagggtcggggatgggaggagcagagccgcagttgggtcctgatgcactcagacaactacagaagggggaggtcgttttgtcagactgagctggatctgtgtctaggagcgaggcatggaagggtcagttccatgctcagggcagaggccacttgacacgttacgtccaggtggctggaaaatgctttccgttttcaggcagggcaggccctccactgggaggcctttgttctgcagt

SEQ ID NO: 64526 - DNA, 3643 bp, Bovine  19866881044517
  misc_feature (1)..(1): n is a, c, g, or t
nctgtagagctgatttttatgtacagtctcctccctgacttgttcaaggaaataaatttaaaaacaaatgacacagaaagattgaatagagggggatggatatagaaattgcagttcaagcaaattctaacttgaaagcagtcatataacacaaagggcttcccttgtatttcagttggtaaagaatctgcctgcaatgcaggggtcctgggttcgatccctgggttgggaagatcccctggaggaggaaatggcaacccactccagtattcttgcttggagaatcccatggacacaggagcctggcactatggggtcacaagagttggacacgacttagcaattaaaccaactgtataatgcaaaagaataattcatgcctaggaatgaatttgcctggattaaaaggaactgtttagaatggtcagcagtacagttcatcaagaagatcctgctcttgtgaccttcaggcataaaagtgcactaggtgaagtgcctgggcattctaggggaaagagccacatctgacttcacgaaagacttcagtgtgtttgttagaaacagagagtaaaagcaaacaaatgggagatggaatgggaataatgactgcaggatgggtgatttacattgactctcaaagcccggggattctgtaaactacttgtcaaacatgcctaaaagctgactactaaataaaaagctgcaatctgagattaggttatagatatttcaaaagatattaataaaaacctctcctacctccttcctgaaaaactggtaaccgaacacacataataaactgctcttggataacagaaaagataaaagctgaaatactaagcagttttggaaattaacaaaaataaggcagcattttggagaaggcaatggcactccactccagtactcttgcctggaaaatccaatgggacggaggagcctggtgggctgcagtccatggggtctcgaagagcgggacacgactgaacgacttcactttcacttctcattttcatgcactggagaaggaaatggcaacccactcccagtattcttgcctggagaatcccagggacggggggagcctggtgggctgccgtttatggggtcgcacagagtcagacacaactgaagtgacttagcagcagtggaaaggcagcatttattaaaatctttgagatattgccagtattcagtgagtggatccatggttgtaagcgatgttgtgaggatatgtgaggatagacacagggcagcctcggaggaagggtcccggagacacaccctgtgtgccaagtggcttcggtcacatacgactccttgtgaccccatggactgtagctcgccaggctcctctgtctgtggaattctccaggcaggaatactggagtgggttggcttgccctttttcaggggatattcctaagacagggatcgaacccagagtctctttaggtctcctacattcacaggtaaattctttaccgctagcagtacctggtaagccatgctaggacgcaggaattaccgtaaatgaagcgagaattccagaaaatgaatgacttaagaaggtagcaaaatacaacagaaacccaaggaaaataggaggaaggaactgatgaagaaggaaacataaatgaatgaaataggaaacagagcagttaacttagggccgttgaaatgaacagctggatctctgcagtgctggtgaagctgaccaagaaaggaaggcagaaaagcttcgtagcaccaggactgaggacgctgtcaaactacatcttgagaatttctgaatttcacaaatttcagattttatcatgtttgtaaaatggactgttttgtaggaaaacacactcagattgacatagagcagttgttggaatatcctgaacagagaaataactcgtaagaaagttaaaaattaaagataatactatggaagctctggatggcttgcaggtgagcagatcttcagtgaaaacctgatgtctttattattgtttttgctttaggactgctcctgtcttgttcttctgactagcagaaccgtgtgccaaaactaactgtgtgcgtgaaaatgcgcacacgtgtcttcagcacttagaactgtcacttagcagtgaagctgtgaaaatactaaaactgtaagaactcacatctgttagtaatatagaatatggacaaagtatgactgaggatttatctcaggactaccacaacagctggttaagagggacatgatagggtcatctcaattcagcatccattcctcattaaaaaaaaagacgagatagtaataggaaaaagcacttcgcacttgagaaacgtgaagcactgagagcctagtcgttgcatcagagacgaggcgagcctgctcctccacccttctgtgtctgctggggacctgagccatgcgcccgagtggactcacagcgcaggagctgtcagattgctgtcattggaaatgagggcactgacgaggtggagaaaggaagatagcagtgttggagctcgggcgagcgctggtgcttacagtgaggacgcacggtgggtcttcactagtctgtcagaacagatggcataagaacagtccgttctcaggtggccgcagatcggttagacacccagggaagtacctgaaggcagcgtgcctgcctctgtgaagacagctctaaaaccactgaacatgcacacaaatgctgtgttcctggatgtaaacagtgaaggcatagagatgggaattttacccccatgtatgtataaatatatattcttaagactggatggggaaggcttatcagaagcaatagacccgtaataacaatttaatcctgagccagggtcatgctagcacagatactaaaatatagttacaaggttgttgtgattaaggatgcgtgccattcatgtggacactgacaagtcagtggagtaggcaagtctagaaacgctgtcctcggagatgcctggcgtttgataaaggaggcgtctatcacagggtcaggggaaggcgtgtggttcagccgaaaggttttcacgaccaagtcccgaaagtgccaggatgcaggctgttttctgcttgctggtatcggatagttctcgtgtcagactggaagtaatgaaggcgcttagctggaataggcatagctctggttaatagcctctgtaagaacagagaaggaactttcttgtgtattttttttcaggttccttgtttgctgctttgggtatttgtaataagcagagatcctggtcaggtcatttaagcaaagggtgtccatggtatttggaagcaggctttgggtgggttaactacagtgtagataaactacttgatcatagaactttgcagcttgaatatggatgcacctcaccagcgactggctaatgtgggtcaggagaggctggaaatgcccacatttcccaagttctgtacgtttgcccagtttgtcctggtcctttttctgtggaattaatttattcattatggaattctactatagatgtagtttgccattaaatagggctgtcctgttccaaaatttgtgattccttggagatattttagtttagaagattgatctttttaacttctctagaactggattaaagatttcagtgttttcaagaaatgattctgttt

SEQ ID NO: 64527 - DNA, 822 bp, Bovine  19866881081980
  misc_feature (1)..(1): n is a, c, g, or t
nggacgtccttggtggcgtggcgatcaggggggccagcagtgggggcagcgggggccccacctcctgccggatcttgctcagtgtgtccacgcagcagtctgcgggtgtggacgtgtcggcagtggccaggatggtttgcgtgtgacttctttggggtcttccatgacctctgtcccctgagaacgacggagagacttcgcgctcaatggtctcaacgcggcctgatgccggagtcctgactggcttgttggactggtctctgtttgaaacctttgatcgattcttatttttgcccagtggctccagtttcgagttacagtaagtgtgatcgaacggagcagcctgtgacctcgaagttctgatcatatatctcggagctgatcctcacgctgggtttaacgggtctgtttcgcaaacgacttttatcaaagttaccactctgcccgctgcttgagatatcctcctgggttccagccgcactgcggccacatgggggctcctgaagaggtgagccggggcgaccagcctctggagacctctccacgggaggaaccaaaaggaaaccagctgccagctcttccgaatgggtggaaaggggggcggcctccggggcgtcacacaggatcacctggcccagctccggcatgagcgtcaccccgttgatgatggtccagttgtcccctttctcaatgactaggttctgatccttgttgatgagcacattgatgacctcagaggtcaccgtggagatctgacattggagcctcacctctccaggccccgcccccgggtcagcgttggggaccgagggctcttcgggt

SEQ ID NO: 64528 - DNA, 1566 bp, Bovine  19866881226041
  misc_feature (1)..(1): n is a, c, g, or t
nccagaagacacagggtctcttccaccatactgcttgaccgaagctatctcaagcctgccctgacttgaggggagaggacacagtctcagtccctttaatggggcaaaagtcaaagaagttgggaccttttttcttttgcccacaaggacctgagcaccaaggcatagcagatagaggagatgtcactcctaagagtgtccatgatcagagactttaggaattaataacatagaagaccctcaccctctgcctggaggggactagctcagcctccagataagcagagggtctctcatttccaggagagttaaggaataggacgggtcatagcccctgttggatagtttaaaaacatttctatttaatggtgaaaggaattacatcacattcttgatttctgtgttcatttgtagaagctctatttgctcttttactaacctttgaaaatttataagcggaaattaaaatccatgtcacgagtcccaagctaaattggtttattatcaaatgctcattatatatgatcctagaaaggtttcaggaaatggacttgaatacattatagactgggtttgttcatacccacctcctcatccaggaaaaagaaaaccacagagagtcagagttaatccataaaactgagagagacgctctttttggtttcttaaatttgaaagtaaagtttatatacttataaaaattcattcagtaatcatgctgaatgtttacctccatgtctcctgactcaatggtctcccattgtattttctctgtgtctctccaatggcgagtatcatatcctgtcttggattttagttatttatacattaatctaatgggcttccctggaggctcagtggtaaagagtacacctgcaatttaggagccgcaggagatgtaggttcaatccctgggatgggaagatcccctggaggagggcatggccacccattccagtgttcttgcctgaatcctatggacagaggaacctggcaggctgaagcccataggatcacaaagagtcggacatgactgaagtgacttagcacgtacacatgcgtacattaatctaacacatactagattatgttctagtatattctatgcatttagcatgtgactcaaatatatacccttaatttagtttaactgctcttttccagccttgtttttgggcatgcacagaaattagcagtcaggattttcaatctcttttatatttcctttcatgttggggcatcagcttcagttgacctttatttatttatttaattgaagggtaattgctttacagaattttctgtcaaacgtcaaacataaatgaaccctacagttgacatttgaataacatgggggttggggcatcggcccccaagtgcagtaaacaattcacatataactttgcagttggccctctgtatatacagttctacatcagtgaattcagccaaccgtgggttgtgtagtactgcagtccatatttactgaaaaaaaatctgtgtataagttcaaatactatttcatttgcaaagaagttcatactcagatcattcataagttttatc

SEQ ID NO: 64529 - DNA, 1879 bp, Bovine  19866881380068
  misc_feature (1)..(1): n is a, c, g, or t
ntaagatacacaaagtccccttatcccagtgacaggaaataagcagatcttactttaccaaagataaacctttataggaaaattactttaggtacctttttctcttctaattcagcttttaaaaatcccagttcttcctgacatttctgtagaggagatattttctgaagcatctgctccacttggtgatgcaaagtactattctctctaaaaatggacaaagcattaacgttattatgagaagtatctatgatgaattattaaatatatctactggtgagtttcaatttttttttctaaaaacaaaaaagaaaataagaatctctttttaaacacattctatttattttggtatttttaaataccaaaattatttacatatcactttttatttctttgacatgactctatttctaataaaagtacatcaaaagccatctgagaagcaaacaccacaggctctcaatccactggagaacataagaatactgggactgtctatcaagtgatgtggcttttccaataaaaaactcatcaccactgatttaaattaaacgacaggcaactttttgattcattttataactacactttgccttcttctaattggtaagtgtaatcagtagcattgtatacaacactactaaattctaagtaagattattttaaattgtttaaaatatacacagtgaaccacattaaactgtcaattcagagacaataactgatagcaataagcttcaattcaagccacatggtcagtaaaagtaactgaaaagccaaaccctaggctgtaatttaagacctcagtaagaattcatttagacaatttaacaggaaggaaaatgtacatcttttattatgagcactcaaaaaagcctacatgatgggtcaatgctttgtggcactttgctgaatttgtgtagaaatccagttcagtaaatgtctaccctgcattgactgtgaaaacaggtagcttaccttcttgcaaactgcagctgtaaaactggttaaagaaaactgtgaccactttatctacaggtaccaggtagcgggtctgaagataaaactccctttaaaactgtaataatctgtgttcaatatacatacaggtgatcataatttctagaaaacaacattcaaagttccacctataacatatgataaaaagcttttcactgagctactcctaatttacagcattacagtaagtcgaaatatatatttctctaaattaaaagattcttgattaattgtatgattaatatgaaactccagacaaaagcaaagacaaaggaataaacaactaacaaaaacgaccctgaatccctgcatgtcctgcctttcctttctcagagtccagagcacagttccagcaaacaagcgttctgtacttactaaaatcgtatacatatatgtatctatatgtttaatgaatacagttggctcagatggtaaagaattagcctgcaatgtgggagatctgagaaaagaaatacaggcagaacataaaatctgaaaaacctttcacttttacaatctgcacaatttgataacatcatttcccatcatgctgccagtaaaatattaccgaagacagcagtttcatctttaagtttcatttctgtagaaccctactctcatatcacaatatagaaatgcctatgggtcataacatgtctgtatcctcctctattagaacataaacttctaatggagtatatgtttttcatcctaaattactgcagtctttgcaagatagacaaattcacaaaaatttctgatgaaataaaatatactctctgtcctatagaaagagaaactgataaacaagaagatggccagaatgacacaaaagagtacagaaaagaaactaagc

SEQ ID NO: 64530 - DNA, 2026 bp, Bovine  19866881576430
  misc_feature (1)..(1): n is a, c, g, or t
nagtggatttgaggcagctggggctgtggcctcacgggggccacctcttactcaggtgtaggcggccttgctgcgcacatgtggcattgtttaaatatgttcttgctttgtaatttactcacttaatcagacatgaaggtttattatcttgttttctttctcatagatctcccagagtctgagaaattgactttgttcattgcaaacatgtggcatgatgtatttatctctcagtcggtgattaataaggcgatgcagttggtagccaggcagcgcgccaagggagaagttctgaactgtttgcgtgccttcctcaattgggagaaggtgaggtttctttttattttgtgcaataatgtacacatagaccttatataaatgttttatttggttttgtgttcgtgagcattttagagctattattcttcatattagatccttcagaataccattttaaaatgtctaagcttgtgcattttgttcattaagtatgtccactgagcagagtttatcttgggtactaatttgccgctggtgaaatccatacgcgtgcttaacatatgtaggggccccgagaagatgcagaccgctgcttctacacgtggtacttaggtgagaaaattgagatcccaactccttcctttgatgatttttctgaatgtaatctgtgttcttcttcccaattgatgaaatttgtagtttttggagtattatgtgctttcttttattttctttagtgactgatgtgttaatataatatgtagattggtgttcttttcatagattttctctaatgagaatccctgggtgctgaattgatagtgatacactataagaagaggtattgaagaggcactgaagtcagtgacaggttgattttcactctgttctgccttttttaggactgtattactgtcctttttagaaggaggctggctcacgcctgtggatggtgcttgtgtgccatcatgctttccttttcagcgctttctggtgttactgtcaactagacttcagtttccttagaaaagggaagggcttggtggataaaaagttaggcaagtcttaaacagcgggtctgcagtcagccctccatcagcccacttccacagtctagagtgtgttgtgtgaggtcccatctgattgtgctcccttggcggctagcagagccctccagggtgcgtcccgccctctgtggttacctgtgcaccctcccctgctgaatcctcccgcttgtgccctgggggtctcctcctccagccttcagggtgaagctagataggatagggtggtaaaagccatgattaacgaagaagggagaattttaataagtgtattttatctgtatcatatcaaataaaaatataaactcaaagttattttaaaaagagagagaaatacctgggggggaaataccattatagtctaagacgtccatattctcttacagaactccacaggtgtgatactcaaaagtaagtagagagatagcacaatcaacaacaaaaaagtaaactggatgaaggctatttttcgtgtctgtgacatttgcaaaagcagtcatagatttggccacacaagaaccttaatttttaaaaagtaaatattctacactcaaaattgtctggtaatgatttggtaaaattagacataaataattgtataaaaatttcccagagattgagatgcacagtctctggacagtctgtgaacaaacagaaactcaaagtaaaatcgcagtatctggaaccctgcattagcagagacctctcgtttttggaagactcacactcactgcggtagtttaaatgtcttcagtattaaacacagaaacaaagttctttgataaccatcttgaaaattaaaaatttgagaaggaatctagggaagaaagaatgtgataaaggaacagtagtaaagttgagaatgaaaaaaaaaccactgcctttaaaaaaatgctaataaaacagataactcagttcagagactataaaaagagcaaagcaaaaaatattcaagatttcag

SEQ ID NO: 64531 - DNA, 1050 bp, Bovine  19866881594807
  misc_feature (1)..(1): n is a, c, g, or t
nacctggagattgggtccaacccgaagaatgtccgggcgtgccagaagggagttggggattaggtaatagggaggggaaggggctagtccaggactggactctctgtccatctgtggtcaccaacagtcatggttggctgaggtcgatgtggaggcaaggccagagctgtcaaataacgtctctacttgaacacagaccacataggcgtggggtgtcagagcagaaactgactttcaagctagtctaggagtcacagggtcaaccagttgcccaaggtcacagagaatgcgatctgtctccaagctcccttcctttcaagcagcctttttcctacttttaaaaaatatttatttatttggccccacctggttttacttgtggcactctggttcttttttttattttacttttttaattttggcacatgggatatttagctttggcacgtggaacctagttccccaaccagggactgaccccaggccccctgcactgggagggcagagtctcagccactggacaaccagggaaatccccctattgtttcttttgttgccacagtgtggacaggtgagcctgatgcaagggccgtgctggctgcgcctctacacacttcacagctgcctcccatcaatctcggctggggctgtggcacagttttgtggttgttggaaactttacattccagggtctcctagaagaaaagaacaactcatttgcagcacctgagcacagtgaacaggcgattagccaaacactcttgtgtctgagcagatgtgtgcgggaggatctgcttaatgctccctggacccctcctttgcctccccagtctgtcagctcagaagctgccctgttcttttctgagtgcatctgcatggctctctaggttagcccaggggtggaaacctggtcatctaggaaatgctgagtctttcctgagggtttctgagcaggaattccccaggctggaggctgaagcacaggagccaagggcactctgggtgccaggtttcctgccttcggaggagcaggctggctcccagggccca

SEQ ID NO: 64532 - DNA, 2304 bp, Bovine  19866880408376
  misc_feature (1)..(1): n is a, c, g, or t
nccttgggacaaatggagttcttctggaagccattctgggagtccctttctggcctgctagctccagagtttgcttcatggtgactcagttccgtccagccctgtcccgccatgactttccttctagggcagaatcagtgaccccctctcccttgctgagatgctgcttgtgtagggatgagcagaactgtcaggtgagaccacggagcacagagccgtgtgtatggatgagagggctgtgcatgttcctgccagatgtctacccagcgggggtcttgtggaggagactgcctctggacagaattccggatatgctgaggaggcaaacattgtgatttacggcaacctactccagtattcttgcctggaaaatccaatggacagaggaggctggcaggctaaagtccataggatcgcagagtcagacacgactgaggcgacttagcaggcactcatgcatgaatagagttgcccatgcatggcaagttctttggtgtgtgcaccttgattaacgtcatggcaaatcaggggtgcagccccttgaatgatcccttgggatcttgtctggggtgtctgcttagttctggaaatactggcttggcttggctacactttgcccacttttgtgactcagcacttcctggccagctgatgctcgtgactgcagaatgaccaagaactgctcgctcagctaccttcactttcacttttttaaaggttgatggcctctaaaccaagataatggacaaatttttatactcagtaatatgatgttcccttctagagtgctttctcaagagagcagtcttacatgtgacttcagctaagcagcttgtggggggtgtgctgtttagccacacctgtcttcctcatcttttcagtgtgcttgagactgcctgttaaaccacgttcactagactcattgcttccctttcttcgtgaaaataaaaccaattccttccttccatttgatgaagacatcgtttttaccgtttactaaaaatcttccttctgtcttgaattattggtctttgggtaagagctagaaagaagcatgctaactcaaaaacctcttcttgattgatttggtttttataatgtcataaagtgtgatagaaggtcttatttgtgtccttggagaaatttatttgtgcctcccttgatgctgtgagctactcttgaggtattgagcagaaggatggtgaaattctgggagaagaaaaaggaatgcagaagagaatggaacaaggacagttaggtccaggagtcctgtcttatcagttcagaaatgaactcaagacttgactctgggagctcgtatgtattggtgatttttaagtcatgaactttcaggtatggttttgagtatttttaaaaaatatttgtttggctgcactgagtcttagttgcagaatacaaactctttacttgcagcatgtgggatctagttccctggccagtgatggaaccctggccccctgaattgggaacatggagccttagctgctgaaccaccagggaagtccctggttttgagtattttctgaatttcgggtttctttggaaattattctttctgttcagtcttttcccctcattaaaactggatttgcatctgcatcaaattttatgttttagcttaccttattcaatcctgtgggtgaattcattttaccctataagtcaagatgttaaaactttggcatggagactacataaaaattccctcgtattcctgtttcaagcagatcctgaatgtacctagaccacaacctactatgatgagtagtaatcttaatgcacgatattttctcatttgtaaaatagggttgctgagaggatggggtgaggttaggcatatgcctgacacacctctcaggtagctctctcatgatcatgttcccactcagcagcccctattgagcccagctcagctattacaatgagggacgttctgaccaggctgtctgtcctgtggcctcaggcggcccttgaggcacatccatggtggagaataattgtcccttagaaggcagtggcaacccactccagcactcttgcctggaaaatcccatggacggaggagcctgataggctgcagtccatggggtcgctaagagttggacacgactgagcgacttcactttcacttttcactttcacacattggagaaggaaatggcaacccactccagtgttcttgcctggagaatcccagggacgggggagccttggtgggctgccgtctatggggtcgcacagagtcagccacgaagtgacttagcagcagcagcagcagcctct

SEQ ID NO: 64533 - DNA, 784 bp, Bovine  19866880814894
  misc_feature (1)..(1): n is a, c, g, or t
nttttagaatactgatacttgggccccatttcccagagatttcttttcaccctaggcattgggattttttaatagctaccccaggagatttcagaggaatcagaaacaaagtttgagattcaccagtctctaaaggaatactatcaatctgttcttctttaccttgatccccacaagccatttttgtcactacaaaaaacatgtccatgtgtcttaaattgtacttatgaataaacattgaaatttttataagcccacaaagggtcacaaacacagtgggcaatcgatcaatatttcttagctagactgaagcatctttcacacaattcaaaaaatattttttgtggcaagacttgtcgcaaagtatataaataatttttgctgtaggaagctgggtgaggtttgctggcgtatgattcttgctttctaaatgataagcaccttgaagacatcatccacatcctaaaatctttcaaattcctgagtgtctgtctggctcagtgccgggcaaattagaggcggtgaacaaacacttattcaactcacttggatttacgattgtctctaagcccatgggaacagagaccttagcagaatatgctaagtgattcattgtggagtctgaggtatacgtttcctcgtgttgtgggaatgtgcattgtttaattcttctaaattccttagagtaaatgagagtattatggatgggactttataaatacaccatataactatttgttgagaaaaggagagaaatttctggtgccttaaaaaacctttcgac

SEQ ID NO: 64534 - DNA, 1669 bp, Bovine  19866880888656
  misc_feature (1)..(1): n is a, c, g, or t
ncttaaacccctctggttcagattcaagtacattgtttatggtatctctttgaatttagcacctgctaaactttgaatttagtacctgctcttttctgctcttcgtgaccagagtccccactacagaatgaaccatgaactgaggacttccctggtagtccagtggttaagactctgtcttccagtgcaggaggcaggggttcaatccctggttggggaattaaggttccatatgcagtggggtatagtcaaattctttttaaaaaataaatatgtaaaaaaataagaaggaaccatgatcaggatgtatttgttgtttcctcatggccagattcaggttaagcattttggcaagggtatgcattcaacaggtgatatatgttccactaagtttgatcccttggttaacatggtcactgccagatctctctgtctaatctgtctatgattaggttgtctttggaagtgatcctttgagaccctctgaataccctgtttcccaacaaactttcgtctagtgattttatcttttaacttgaccaccttaaacaaacaaacaagcaaaaaaaaaaacccttctcaatgaaattcctggaactggaaacttaactaaatatcactttagaataggtaatttggataaatagattaaatcagacagccttgcaaatatgtttgcattgttatctggagcctctggatttttctagtcttgacctgataagaaaggacttaattgatgggcctgccgctttccatgtaacccctccagagacattctgtcctgagctgcagtactttttaatgtccatacaaagtgaatgtaaaccccttttaatgttgaagcagtgagtgggcgataatgtcatttttgctagctggcacaatttggggggcatcctcaaagctcagttgactctttgcagaaacctttaatctcctttttcaaaatcactatatgaagccgactttaaaaatgactgatgacttgccctggggcctaaactggatgagtcttggagttggtctgtgcctaccaatttgttcatgctttttagatttaagttacacaactatttttgtctcttctcgattggtactcttattttcatgcacaaaatatgtatgggtggggaaagtggtgtggagtagtgaaaagaatcaggaataagcatgctctgtgttctggattcagctttgccaccactagcgctgagcctcagtgttctcatctgtaaaagggaatagtaataattacgtgaataacactgaacattcattgagtgattcctgtgagtcagccaatagtctcagcactttatatatgtttaatatccaacaataatcctgtgaagttaatgcccctattcaccccattttacagatgaagaaatcaagtcacaaacttcaaagggctcaacaaagctaaaggaaaatagtatttatgaaagaactggtggtgtggggctgggatgggagaatgttatataaattcaagtgatcatgtcatctgtatgtaaatatctgcatcctcagaataattatttaaaaacccattatttacaaagaaaatattattatggaaagattacggaaataaatttgaaactctgccaaatttaatttgagacaaactaagcagtcgcatcagaaacctctttttccattt

SEQ ID NO: 64535 - DNA, 1556 bp, Bovine  19866880987069
  misc_feature (1)..(1): n is a, c, g, or t
nccagaaactgagtggtggcactggggccgggcacctgttgtcacgcaggctggcctgggggagagcaattagtttgtttggcaaaaccactggaatgttcctggtgggggcggaagctggggagtgggtggtgggtgtgctccccgggtgtgttgcctccttccgagcagatggggctgaaagaatttccagagggaggagggacagctccgcccggggaaggcccgaagggctgttttcctgtccagatggcccattcataaaacgcctcttcttccttctccacatggcaccggccctggcctagttttccccaccccaggggttcatttctctcaaggcggggaggaggagcaccgttggctgaagaagcacctggttctccaggccctaccggggcactctcagtgggcgcagatgctcaggaatggatggccggcctttgcggggcacgggttcggccgggaaccatcatctgccaagggtgtctggctagctccgggactgactcacacggtgccccagttcaggctccgagactctgtcccagggtgcttgtcacagcggcagctcacctgggggcccagggcgcttggggaccacgtgatggacttggcccggtttgtctggactttgccctccacccagcttcatccgcttactcaggggctgatcagtaaggttgcggggagacaggtggtctttgagggtcctttgcagggaagagctgcacccacacttttccttgccattcctcctgtgtgttccccctgacccccgacccgtgctccccttagcatctttttgccacgtctttctggcagtctcaaactgattgtctctctctattctggcatatttatagtgtgacttgttgaaacacatgaaaaatcccaactctgtggcttgtttttgctcaggggcagttgcctgatgggagagaagcagaggtccttagcctcaagctccttgttaaccccgaagggctcagcccttgagtaaatgaagaagggacatctctgctgaaggcatttcactgctgtgtcagggctgcacggggaaccggtgacagaactggacgtgcaacccaggaggacgctatctccccctgctgtcagaccagggtcctcggcagtggggtctgcacccagcctaaccccctcgactcttccaagacagtcttcctgtccacctacttgttatagctcgttagagctggttataggctccgacagacctcatgggagaaatttagatgtcttagttcatccttttattcagtactttgtatttaaggacaggaatccccaagctcaaatatatttttaaaggcagtattggttgaagcaggagtactctctgctaatcctgtctcccttcaggccactggcatgaagtgccagtgacactggaattattttcacagttgcctttaagccccataaagacaaactttggaaggtgatgctggcctcaagacggctgctgccactccatcagcctcatagcaggctgaggaagtcatcacagttctttcttaactttttattttgaa

SEQ ID NO: 64536 - DNA, 1395 bp, Bovine  19866881149494
  misc_feature (1)..(1): n is a, c, g, or t
ngaaaactggcaggagaatggtgactcctggggagacaagtgagcaacttaacttcctaagtaattaaacagtaaatcaggcaagtccatcaggggacccatggtctctggtcagtgcctcacagagagggcttcttgcctttgttctcttttcttccttccttccttctttccacgctcccccctccacccccgcttttggtgtcatattttttgcaagacttttagaggtacttagctgtaggatattttctcagctgcagcactattgccctcttggactcgtagtccttgtttatgggtctgtcctgagcattgtaggattttagcagcaccactggcctctgtccagtagataccagtagggctcccaattctgaaacaaaatgtctacagtgtaccctgggggacattcacccccagttacgggcccctgcttatagcagaagacagcctgttcttcctgctgaaaaatgttgcagttacaacttgggatggtgaaatgatgagtcacttcactccatctcctcttgcttcacaaaagttttataaagagaggccagccaatcaggaggtttgtgggttgggagtcagtgtgaccacgctgtctgaggcggctgcattgctaagcgtcgttatggggtcctttgggggttcttcaggaccagacccagagtcaaaaacaagcaaataaacaaagcactctcatcaccgccacccacaaaaaataggaaagtaaaccagaactgaaggctttggaattttattaaaaatggcctcatgattagcaccagactccctccttcagaagcggtcttaggcatcctgtctgcgtagagctggcctgggcattgatatgtgaagaggctgagaacatgtggtataaacatcgactgatattgtttgccatttacactcagcatgtgtaatgccacaggaattgctcctggcggcatgtgactctgcttccagccgggtgtgcggtgcccggggtgctccttctctttcgctggccgccttgctggcgtccccccctcctctgcccccttcccagactccggagagtctaagcggacgcttgtcatgattggcatgcggaaagctggtagaatgtcatcggaattttctagggaggcacacgcgcaacacccaaaatgactcccggcttcggtggcctcaggtgagccttccatgccaggagccctggtctttttcagaaaggtaaggttgcatgacgtcatcctacctttccccagcccaagcgggaaatcaagggttgggtttttttttttagttctctagtccgggctgcactttagaccgtgttcttggcgctaagcatttgtgcatgagtatgcgatttgtgggatccccacccccttctgtttaaaaaag

SEQ ID NO: 64537 - DNA, 1730 bp, Bovine  19866881355976
  misc_feature (1)..(1): n is a, c, g, or t
ntggtaacatactgttcacctcattcacccagtggaaactctgagctagagtgttcacgattagtgtgaagttacagtgccctctggttggtagtctgtcttttgaaaaatctgggtctttagccctccctttgccctttctagcactgaatcttgggaagtgatttctctgctaaaatgactttggtttgtccacacacaccagcacatgcacataccccagctctgtgcaactccagtgggaaagggagactgtggtttcatggtagctgtctttttgatgaatgtccccatgtccacccacagaggccgtgacattcctgccttccccacttgataatctgaaaatcttctgagccagatggcctttgctataggcctgctactctagaatgccacgcaggttctgggtttcaatccccagggccctccctggctcttatttgtaagagctggtgggcttgaagctgataaggcggggagctccctgaggtccgttcccagagtcaggaaagacacagtgctggaggcagggcagcagggcggagagagctggggtcagggtgcgcagagcttgacgcaactacatggtcttgtttgagctttcccctttcgtctactctcagatgcattttgctttttacggctccacactcttgcagtgtgttcccaaacgtgcccaactcttacctccatcttctgacctctgttggctaaagtgacacagggaagtgtagactttactctgtggtgagttgttcctgtgttagaagttttcatcctctcacccggtgggagatttttacactagagtctgataattcgtttactttaaagttgacagcttgggaagtttatggttgactttctggtcagaaggatttgtcagatattcggcctggattttggggactcttctagaagagccactgtcagcatccaaggtctagtctgtttggtggtccccagactctgaaagtgaaatgcagagatctctgaggggagagttttggatcttaattgcctgccttgggaacttcccaggtggtccagtggttaagaacgtgcctcgattcaatgcaggcaacacagattcgatttctggccggggaactaagatcccacatgctgcggagcagctaagtgcatgccccacaatgaatgatcctgcgtggtgtgatgaaggtctcccatgctgcaactaagacctgatgcagccaaataaataagtaaataaatattttaaaaattaaaaaacttgtatgtcaaaataatcctcataaagaaagaatcgcctgcctttggatcagtttcatcagttaacctatttgctatgtgtcctttggacaaagtgttctaacttctctgtacttcagtttttccatctgtaaaatgggaatggtaatagtcgtgccacctgtggtagttaggaggagtcatgagatgatatttaagtgcttataatattcagttcagttcagttgctcacttgtgtccgactctgtgaccccatgaaccgcagcatgcccaatatagcaatttttaatgtagaatatacctaggcactatgaacattttgtgcttaatgttgactcttcagttcagttcagttcatttccgtcgctcagtcgcgtccaactcttggcgaccccatgaatcgcagcatgccaggcctccctgtccatcaccaactccaggagttcacccagactcacgtccatcgagtcagt

SEQ ID NO: 64538 - DNA, 1566 bp, Bovine  19866881958187
  misc_feature (1)..(1): n is a, c, g, or t
ncttcctggtgctctacagagaaaagcccttttaaggaggcagaggctctaattcctgagtccctttttcataacccaggttgggtcccttgatccccactcaccttgactctctcatctataaatacaagtaagactctcttacttgccttaaagcaagagactggctctgatacatttctgaaattcctgttggttctaataccaaggattttaatcaagggtagctatggcaagatcctgtcacccaacccccaagtgtcacagttcttagcccgtgaacagcaagggttgggttgtggtggccagctcccccaggctccagctggagctcccagccggtctcagatgactcaccttcagatcaaacaccttcttgtcgcagatgctacagacgtgcggcaggtggaggggggccacaccgtggaagtcattcagctcgtgcgcttgcaggggccgcagggacagcactgcctgctcctccttggcccgcctccgggctccgctgaagccctgtttgctgttgttgagccgacccccaaaggaaggagggggttctgtctggtgtgggctcctcagggtcatacagctcatagggctggccagggggagggggccacaggctgggggctgccgcaagatcaggcttgctctggccagagaacccatgggggctctcccactggctgtttggaccctgcagcaggggacccacctcgcctttcaaggccccagccggctcagccacaaatccacctgccacctgcgacccttgggcactgggtccatagaagtccttgggaaaggcagcctggccatcttgtcctgagtggctgtagtgcccttcgtaggtcacgctgcccgaggtagcagccgaggctggcaggaagccgggctgaccatcggtttcagaaccatatgcctggccagagctggctttgccatattcgtagaaccctgcagcagcgggcgcgggcccagtctttccaaggcccaggatgaccgctggctgggtgggggtctgaggcatgaaggggtgcatcaccatggcgttggggggctggctgggaaggctcaccgtgggccctgggcctcgcgtctggccagggggtgagaaggcgagtgcgttagagggaaagcgggtgctgggcacggtggccgcgtgttggggcaccccggtgtggccgtggggggcgctgatcatggacggatgccgcagctggttgaagagaggctgggacatggccactttggagaggacttggttgaggaccgtggcagccgcggtgttgttggtgacggctgtctgtgccagcttcaaccggtggagggtgagctgagcttgcagttgggccagctggaggctggcgggcgaaggaagcagcgggttcggattactgaccgagaacggggtcttgtccaggagcttggcggcactgtgaggagacaaagggctagatgtacggctgctttccacctggcaggcaacgggctgcttgtttgctgtctgtggtcccccctcccatacaaataagacctcccacacaggccccacatagatccagt

SEQ ID NO: 64539 - DNA, 2207 bp, Bovine  19866880186793
  misc_feature (1)..(1): n is a, c, g, or t
nctgatgcgaagaactgactcatgagaaaagaccctgatgctgggaaagattgaaggcaagaggagaaggggacgacagaggatgagatggttggatgggatcactgactcaatggacatgagtttgagcaagctcagggagttggtgatggccagggaagcctggtgtgctacagtccatggggtctcaaagagttggacatgactgagtgactgaactgaactgaactgtgctaattctccgacctgtttcgggtggcacgatgctatggtcttaaccctcttcgttgggacttgggtgttgtcccctgtagatgggtcaccccatctccagtctttaaacattccacaccactctctatagctgcactgtccaataaggtagccactggccgcctgtggctatggagcacttgctaggggactagtccaaattgagacgtcctcttgaaaatctgcaattgcaaatctggctcccattggactggtactggacagtgctggcctagagtctcccacatcaggccagcatcttgcctttctgctgcccacctgaccctgtaggcacatcaattttgcagttcctgctgaatgagaaggaagtataagctggagggaggagactagagttcaagtctgactctgacgcttgctgtgtgacattgggaaatctcctcccctctcagtgcttggtctcatttcatgatgaagactttggacttaatctctaactttccacagctgaaacttcctctcccacacacctctgaatttacccttttgtggtgggatgctgcctgccagctttgagctaagcattccctgctgccagcccctcctcttgccctgattcccagcattccggctgcttctgcatctttagggggccctgtttccatcaggggcctccctcctcactccacagggggttgaatcctggctcattccgcttggcttgttgtttacaaaatgagaggttgaccatgtttctcttttttggctaatatctgcaatttgccctcatttaactcacatatctcagctattagtttgctcaccttcaataattattgtcatgcacccttgggctcataaaccattgttccaagtggtgtgtcgcctattttaagaacttaatttgtttgtaatgtgcacatcagctgcatgatttgtttcttgcttgtaattaacttttaagctgatgccattcccccaccaaaactgaaactcaaggtaaagttggtaagattaattcatgctggctgcatccaaatcttccaacatcttcattggactcagcaagtttgggggaaatgatatttttttccctccactcccatctgttaccctgccgatcttggagccaatccatccattagcgagcttgagtgttggagttggaatctaacactctccagtgtttccagtgcctgtaccaggataagcaaactttccccccaaacccccttaaccctggaacttgaatgcatctcttccttcctgagagggtccctggactcaaggatgaatcatgaaaccccttactaagttgtataatacctctctgctttccctagttgtgattgctgatttccatggtcttctgcagtgacgtattcagcaatgccttggattcataatctgcactgttggaggcagtgattgggttggacagagccagctttattaatctttccatttaatgacacgacaccctatctgtggctcatgtgtgaaatctgaattccaggcagctttcctctgtgaccgagcaaattgagaaattaggctgtactagatccatgcttctcaaaccttagtgtacatgtgagtcgccgagagatcttgctaaaatacagattgtgatttagtaggtccagaatgggccctgagcgcgagtgtgctcaattgtgtctgactcttcacaacaccatgggtgtagcccaccaggctcctttgtccatggaaattgtcaggaaagaatactagagtgggttgccatttcctattgtcggggatcttcccgacccagggatcgaacctacgtcccttgcgtctcctgcattgacaaatgggccctaagaaactgcattttagcaagctcccgcagaagccaatgctgctagtctaggaccacactttgaggtgtgggtactagactgcacgcctcacgaagactggaactgtatctctgacacatgaacgct

SEQ ID NO: 64540 - DNA, 2579 bp, Bovine  19866880555722
  misc_feature (1)..(1): n is a, c, g, or t
ntgtttttcctctgcttcccgcccccacctgtctcttccctaatctttctttccttaataatcgcacccaccatccacccagctgcttaagctgaagacctgggggctatccttggatttttccctcttgggaaaaggtggttgtgtgcagcttgcatggctgcttaagagcaggcttgggcctggaatgttttcttgtaaagagataacaagccatcacagcctgggctggatgcatctccttgcctgggcgtgtcttttcctgctctgggcttgatgtgaactgccttgttctgcttaagcctgtgtgttgtgttaatgcctgcaacccccccctgccccgcccccaccgctgctctatctgttcctggtgggatgggggtttggggcccatccactgcaaaatgaagtggggttcatgtggccatagcactgcgtggaccgcagggtgcatctcggaccctggggcaccgacatactttgagggacgggatctggtgtgttctcatttgtcttgctgcacacaagcgctggaccccacgagcttggtgtgtgtgttgtctattcccactgaccttgaatcatgcacggatctcttccctgggtgtcacttacctgtcttttaaccttgaccctactgccttacaccaccatggagcgggggaccattcctttctcgagttccccatactcagtctagtgcaatttataatcattctccttcaaatgtgtgcctcaaatgcttccttacctccacttccacccacacatctcccccctggacttctggattagccttctctctccctgcttccaccttcatccccctccaatccatccttcccactgtagccgggtcagtcttctctttgaaagctgtcaagagcttctcgtggcatctcagccagagtccaggtaccttctcaggatctgcatggccctgcctgtctcatccctttcccctctgccagatgagcgccaccagggtggccattctgaacacaccctgcgtgttccgagtctttgcgtattctgttccctctgcctggaaccggcaactcttcccctacctggagtaaaccctccgatttcaccattgcttcctgctgatcactgggtgtctgctcccctgtcctgtcctcagagaggccttccccaaccgccttgggggtgggtgagtctccagcagctgtgctttaccttcctggcaccgaccaggaatctggtttgtatactatggattgcctgagcctcctgcttggctgtgggcaccactagggcaggggtcctgccttttttctctgctgttcaatacccattgcccagatccagggtcatagcagacattcaatacaaactcgttcaaggatcgagtgaattagagaaaaaataagctttgggaacgcagagaacacagaggactgtgtacaagaggctgacgttcactgaagcaactattgtgtgcctcgcatttactctcacccacggatggctatcaaattcatctcgcagcccagagaaatgtgattcccctgctccaggtacacagtagcgaggttgcaccctgctcaagcttagcctagggtttcttgatcttggccttatgacgtttgggtcaaaataatttttcattgtgagatggagggggaggctgtcttgtgccttgtcgggcatttagcagtacccctggcctctaccctctcaatgctaggagcagcctccccaacttacgacaaccagaatgtgtccagacattgtcaactgtttcttgggggccaggccagcctccactcgaaaaccaccagtttagcctcccccgtgctcctccacgcctgtccccaccatccccgtcctctctgagagctgctgtttcttgtggactttccctaaccccctcatttccgacactcctccctgtgtatccctctgggaatgcctcaaacggatggtgaggttccgcgtgttgcaacaaacatttgcttttctgatttatttagcatcagccccgagttcagacgcttgtatcagtggcatggatgctcacaggctgtctagaaagtgtgcggcgtattttccccctttgtctacatcacatgtctgaatgtttagcgtgagataaaccagtatgtttatgaggagataacttgtcaaaacagactcgtggcttcaccgctggcacagcctggcctcctagcctttcttcattcagagacagaacgcgaatgtttcttgggtgttttatgtggatttaaagtaaaaatttatttcctgccttttttgatggagaaaaaagccctaaatacaagttcttttttttttttaacaaaagggacgaagagagaaaaaggtatagaaaagaggcatgtgttcattagagaaagaatccgagtgagttcctagtcaagggatccagttagaggtagggctccctttttggctcattcatccgcccatccatcccctcatccacccaaccataccctccattcatccatttatccacttgtccatctattcatccacctgcccatccattcatccatccatccatctacccattcatctatctactcatctat

SEQ ID NO: 64541 - DNA, 1178 bp, Bovine  19866880598196
  misc_feature (1)..(1): n is a, c, g, or t
ngaagattatcctgggtgggcctgacctcatcaggtgagagctctaaaagcgggcttaggctttccctgggctcggggactggaagtaacagagagagtcagtctctttccccatctccccacctctccctccactgctggttttgaacaaggaaagctctatgaggtccacagcttcaaggacatgctgctaagtcatttcagtcgtgtccaactctgtgcgaccccatagacggcagcccaccaggctcccccgtccctgggattctccaggcaagaacactggagtgggttgccatttccttttccaatgcatgaaagtgaaaagtgaaagtgaagttgctcagtcatgtccgaccctcagcgaccccatggactgcaccttccaggctcctccatccatgggattttccaggcaagagtactggagtggggtgccattgccttctccatcaaggacatgagtcctgtcaataaccacatgatctcaggaagagaccctgagactcgatgagaccccaccccagctgacacctgaatggcggccttgtgagaccctgagccaagaatgcagctaagctgcacctggaatcctgacccacagaatctgtgaaataataaataggtgttagtcactcatccggggcaattcattacacagctaatatacaagccaagaaccaacaaatctctaaagaggtcaaggtgggaatgatgtcagtgttactcaaacgaggaaccggcactagacatttctgcacatgggcctccttcagtaataataaaacagaaaagacttcaaaacctaactggcccatttcctttacctgtcattctctttttgaaaattaaaggcttccatgggcacccagggttgacttgatcacagcatggttagataagcttccaagtgctaaggaaaagaggcctctggcagcataggaggaacaagttgctctatgagaaagaaaaaaaaaaatcttttcaaaggaaacgtttgcgtctcaaacccaaaaaacaacaacttcagccaagaagaaactcccactatctggcatttggagagctggaggagagatgatgcaaacgggaatttgttctgggtgtgcaaatctctgacaggtgtgcaagacgcaacaatccccacgttaattcccaccatcctggacaccagcttc

SEQ ID NO: 64542 - DNA, 1562 bp, Bovine  19866880632194
  misc_feature (1)..(1): n is a, c, g, or t
ncttgggtcgccccctttttatatacctcactcttctgcacagcacttgtcacaagtgtaattcagcaacaactggtattatcaggttaagaattatctcccccgtctgaccataagccccatgacagttggtacctcgtgcatcctgcccccagcagcgtctccagcaacaagccggtattctccttatgtgtttgtcaaatgaataagcaactgcaggtgacgacagcaccattggaaccagatcccaacccacgtggctctgacaaatgagaggtcccaaggagggctgaaatcaaggctgcctcccaatatctgggtcacgtcaccaccatccgtggggtcacctcttcttctgtctgctcagcttcatcacctggtgtcttaaagccaaggggcccatactcggtctctcctgctcccagccaaccccgaggagcagtgtgggaaacggtgctcaagagagcggggcagaagagtctgggccacgtgaaatcagggtcccgaagaacatggatgtaactcagacaaatgtgtttagcatcttcattttccttccgagtaccacttactcatccggggcccaaatagtagttaagttttcttccccagggggacagactgcagaaaccagagaggtgggcagaggggagtttgaggggggcacaggatgagaagactggatgccacctctgctgcagagggcatgagggggcgcgtcggagagtggctaccttccagggcagctgcggcctcctgcaaggttatctggaatgtgacagggcaataaaagtgagtcatcgtcacccagccagagccaactcagccgcctggggctccgtgaagcgtgtccccagatgcaaagttactcaaattccggaatgagttttgccttaataaagggcataaaaatgtccgtgcccataaagaccggctgctgtgtagagccagtgtggctgacagagccagagtgatcagctgaagggcgccaactgaaatgagcctcatgctggagacagacagtgtcataccctttagagacatctgtcctcaggctcctaacccagctccctggctggctagctgtgtgaccttgggcaagagcatctcctctctgatcttcgggttccacacgcctaaatgatcaccaactgcccttcctactctgaaattcatgccacagctatgaaaagttctgtgcattattcctcccagggttgatatttgcattttaaccagaagtgtccactcactccagcagcctaccggagaagagtagaggcacacaatatagttgtccaggttcaaatcctggcctcatcaacaatgaccctctgtaactttagacaagttccttaacctctctgagcctctataccttcatgctaaggataatacaaccaacggaaaggcgaagaatcttcttcaaaatcctcagcccatcttgtgactggattccccaggatccaacatctctgtgctgaggtttctgggcccttctgtttgggacagaagccaaagcatcatgacaaccaccaccatctgctccacaaagcaccccc

SEQ ID NO: 64543 - DNA, 1184 bp, Bovine  19866880803817
  misc_feature (1)..(1): n is a, c, g, or t
naaaaaggtataatagaactatcacctctcttgatttaaacattatatttctagagatgtgggctttattttttttatgaaccctatcacttcttgggacctgctgagtatcttggtcaatgcaaaaaacaaatgaggaaataaacaaaaatcctgtgattgaggatcacaatttcaaatgcttgcagagtccatgcagttaacataaatgtgtgaatctgattacatgtgaggtaacagggagtgaggagggctgtagggaacctaaaaatgaatgccttgtccaaagacattaaaacttaagcatttaagaatactatgctggtgaaataaaatactgatgcatccatgagccagatcaggaggcagtccactggttcatgattcttacaaaaatcaatttcaagtgaattggaaagtcacatctccctcttcctgcaagaatgtatatccttaaacccttcagtgcattctgtagtatgggttcatcatttcaatctggaaaagacagttttgaattttacttccatcatccaacatcttaaatcatttcaattaaagcaaccagattattaacatcaaaatctatattccctcttgaatctaagcctcttccctaaaccaactggatttacaatcattaatttaaaaggataataaaataagaggaaaagaataagatcacaaggattcttcagtcaaatatctttggggctgccaggtggcctcaggctgtctcagaggcgcttaatccttgtcagaaagaaaatgagaaactatacatgtccacgggcttccctggtggctcagatgataaagaatacgtctgcaacgcagaagacccaggttcaatccctgggtcgggaccatcccctggagaaaggaatggctacccactgcagtatttcttgcctggagaattccatggacagaggagcctggtgggctacagtccatgggcttgcaaagagttgaacatgactgagtgactaacacacacacatatatgtctagacccaaagccctaagcccagtgcaaacatgtattccaattggtggagttatttaccataaaggtcacctctaacagtcactttcacactggccacatttaatcttcagtttgccaagataaaagctcatagcaacctaaaaactcaaagaaagcttctggttgtcccagt

SEQ ID NO: 64544 - DNA, 1319 bp, Bovine  19866880810250
  misc_feature (1)..(1): n is a, c, g, or t
ntatcagttgcacagtctgactcacatgtggaacacgtgcattaaggaacaggcaggcatgggaagagatccttaagcacttctgtccctcttccaccaataaccggttctggctagacgctttgtcttcatgaaggcagagaatccttccaggcagagaagttctatttgtatttacagccgtcccccagttgtatttgaaaatggaagactgtgtagcttagggcccccctgggttcaccgtgcttacttttccttaatgcctcaattgtacttttaatcagaacaaatttcgagcattaatcctccgtggttgtgcctgccatttccagccactcaacacttttttcataaacaaagtgacagtttgattgaatgtggttttttaattaacttgccttcacttggagcaactttgggagcatatgtagggagcagaacttcagaagtgggagctcaggctgacttctgagaaacatctccaggcagttcgaggagaacaaaggaaaccagacaagtggaattaaccaggcgccaggaacagggcgacagcccccaactccgtccccgctccccgtcccctgtaataagtgtgcaaaggctcagcagttggtccagtcgtctcatggtgaactcagagcatgtgaaatctgagaaaattgccccccagtggctatttacatggttggcatttaaactgtttctggcatgtcactctctttcacagttgggacttcgcaaaaacaaaatgaaatgagaccactgttattctgcctgcaggcacaactcagagttttatgagcaagggtggcaatacaagatcttccaagatcttagatgtaacgggggagacaaagaaattcgtggggatggctccatacgagatgggaagtgacgagtgagtagtaccagcttggaaggtggagctggagctggaaactacattacaggctcttcagagggctgttggaatataacaggggacagtatgtcagaggacagcgtttgacctccttgaagtgggagttcccatgcagagagggtcccagcgttattgtctgggtaccatgcaaggctgcaggtggaggtgatggttttaagtggcattagctgagaagcccgtccctccctcggtgttctggtattctgtggtctagagatctagcctgataaatagctctgccgtggagaaatccatcacatcttcgcatgactcatctcgctgtggcaggcatggcgctcggcttccaagaatagcctagcctgagggatccaagctcggaatcccttccaactttcagggcttctgaagttcggcg

SEQ ID NO: 64545 - DNA, 1478 bp, Bovine  19866880845118
  misc_feature (1)..(1): n is a, c, g, or t
nttcttttctattgaataggtggagttggagccatctcaaagtaggtaattgatttttgtaatggttttgcaattacctgtaatgaggccctttataactctttaaggtcaaggaggaaatctttggtccagtggcacccggtgtggagaattttagaagcctctttgctttgatccagggctttcctggtggctcagaccgtaaagaatatgcctgcgatgcaggagaccctggttcagtccctgggttggggaggtcctctggagaagggaatgggaacccactctagttttcttgcctggagaatcccatggacagagaggcctggagggttgcagtctacgggattgcaaagagtcagatatgactgagtgactaacacttgctttggtccaaatttccataaatgggggcgattaagaaggaaagggcagcttgaggacctgagcacactgaccactcatctgttgtctccagttgtccccaggtttggctccgtagaaccaggatcttcctacagcggcagacttggtcagtccctgtccaggccctgaatttcagaacgatttcatgggccagaaggaaggacagaagttggctctgctggcccctctcttggcactgcagttccagtttggctggaggctgtgtcccctccctggtccctcacagatgtgatcacagtgggtgcagtctccaaggcacccagatgctgtatgtggtacgggtttctcgggaagtggcccgagtcctcctcctctaagatttccgacttcaaacgtctcctcaacaattattaatttaacgtgtgtttttaaatcactcccttttaaatttaagtacatttgctttaaaaaagcaacttggcatcagaaccataaatggaaaaccagtatcacttcctacaaatagaaagtaagtgcaaaaataaatacgacaaagaccaaacagtgcttttttatttctagctggagcctgctgcctgcctaaaggctctgagcctgaggcctgaactctgttaaaacgggagattagccagcgtcgtagagtgttcgggactttttgtgtgtgtgtgtgacgttttcaggaagggttgaaacagacttgcaagggagccacttttttaccatgtgatatgatgttatttaattttgtattcttgtaccaaccacctaaaaatcatcgcagttaacatcaccgttacagcgtcacatgtgggaaagagttctaatcttttctagtagatgcccttgcattttgtagattggttctttgtttccagactgaggggcctggcatgagagtgatgtacgagagaagttagttcaagggttagtagtggttgtagcaggactgtgcatggggtgctgacctgcaggggaagtacaagagatgtgggatatttggcaagaagagaatatagtgggcatgggttggaatagtagagctaaaatgcactatctcactgttgttcctg

SEQ ID NO: 64546 - DNA, 2110 bp, Bovine  19866880979038
  misc_feature (1)..(1): n is a, c, g, or t
naactttcctgtgaatccaacatttggcaattattgtcaaattttaatacacagttaccatttattaaagcatttttgcccacttacggttccttaatttacagaacaagggaacaagacagaaaggtattcattgcataatgtgtataaaggaaaataggagggagcatcatactaggtctaaaagttgggaattagctaaataagttactgtacatctgtacaacagaatatgatgccctagtttttaagaagaatgagctacgtttatgcaaacatggaaagaacttcatgatattatgttttttaaaaaaccaaacaaatagcaattatttatttggctacaccaggtctcagttgccgtacatgggatctttagttgcagaatacagattcgtttatgtgcagcatgtgggatctattttcctaccagggattgaacccaggccccccggattgggagtatagagtcctagccactggaccagggaagtcccagggtattgtgtcttgagtgataaacagaatggtaggataggcccattcatgtactaataaaagctctaaatttgtacgtgccctgtgaacagatatgtgtatatatgtgtgtaagtaggaaaaaagctgtaaagtcatggtaggaagcttagagtgggattgtaggtaagtttaattgcgaacatgcgtgagtgcatactaagttgcttcagctgtgtctgactctttgcaaccctagagactgtagcccaccaggctcctctccgtgggaatcatcaggcaagaatactggaatgggttgccatgccctcctccaggggatcttcccgacccagggatccaacctgggtctcctgtggctccagcactgcagatagattctttaccactgagccatcaggaaagcccttagatgcaaacaggggatttcaaattttactgtatagaatacgcttgtatatggtttgtgtttcataacaatgcatacagatagtcattgggtatattttaaaaaatcaaaatcatttaatgggtttgtggtgatgattttaaaatcagcccacaatttctagaatactcctccatttaaaaggtaaaatttaattcccctcccctcgatgctccaggctaagttgtactttcctgctgagaactggaatcaactatttttctcagaagctcaagcttcttggagtggaaaataacacatagactgaaccttgggggagttcactgccattagattggtcattatttcttggatttttcaatggggaaagttagaaatgcatatttcttttgctttcaaaagagaaaatggattatgaattcacagtgtataaaaaagttatttggatgacggtgctttcatggtgtgatgaatatgcagtttcccattcttctttttcttcagtctgctttttaaaaatttagttgctaaggacacatcatcaaataatttttttcttttggtaatgaatcttctattttagttagaaagaaacaattatcctctttttctaatatagttacttgtctctgaatcattcaaattaaattgagttgttgcataaccaaaattagtatctttttttggtctaactaaatattttttaaataatatttttgagacagagaagtaaaaagaacaaaaatattctataatctcagccctcagaagattaccactaatatttttaataaaaattatacatatacatgttaattgctcatgaattggaagacttgatattgttaagatgtcaattctctatacttgtctatgtatacaatacactcaaaatcaatatcactgcggttttcttatgtaaagtgacaagtggattctataatttatatggaaatgagaaggacttggaataggcaaaacaattctgaaaatgaagaacaaagttgggggatttatactcgctaaattagaggcctactataaagccacagtaatcaaaactatgggatattggcatgaggataattatataaatcaatagaaacaaacaatgagtccagaaatagacttgtacatgggtaaattgctttttggtaaatatgtcaagcaattcaaagaaggaaaagaacagtcttttcaaaa

SEQ ID NO: 64547 - DNA, 1355 bp, Bovine  19866881183750
  misc_feature (1)..(1): n is a, c, g, or t
naccgcggccaccggctcccggagcgcacggcggcggtaaggccgggataggcggctgcctggcggcgggggcgcctgaggcgggcgcgccgctgtccgtggtgctgaaaccacgatctccgcccgttcccaggcgtctggtgcggctgaggaatcaattattcagatctctgctaccgcttcctcctcccccagtgcctcgcgctgggtacagcaatcccccttccacgcacaggcgcgccaacacacacacgcgcgcgcgcacacacacacacacgccacagaatctgttccaatgcctctctctgtgcctcgccacccccaaagaggaacccactcctctgatctcagggagccacaaacctaaaactaaacacgtctggacaccctccacttgcttctttcttgttttctaagttataccaaacaaaagtcgtcctgaagctgtcacttttaagctaccagcagggtcaagccagagagcatgggactcctgggtgtgtggggcctgactgacttggattctggtaactgggcttgaaacgcattgctgttaggacatttgccccctttacactccttccaacactgcttttttcccctcaggccctggaagaaacgagaccttaaagtgtaagaagttttgcaatcactgttctaaccctgagttctccacttaaccggcctggtgccacctccaggcccattattcatcttcttagttgacttgctagtcggaaaaatggggaagacagtaaaaaaaaaaaaaatcaacttctcagggttattttgaaaatgaggaaactccttggtaaaggagcccccaagatccagcatatagtacgtgctcaataagccacaaggggacctgggagagaagggaccccttccaggagtgcagatgtggccactgaaatagagacaggaatggaaccacagctcctggacacctatttgtttattattaagttggtggctgtatgctgagttatccagagttttatcacccacagagaaaggatgggagaaattctggagggtaagattgtggagtggtgtgacataaggcagaaaactgggaagtgttccgttcctgaagctgtaacttggctgagctggattgggcccatctcttgggtggagatgatcatttcttggacttcagcacaggttacaggaccctaatttggagaggtttggcttttttctattgaaataggacataaattatataaaataaaatgcatctttgaaggactcagtttaagtttcaaagtgatatgcatctgtgttagacgtatcacccaaaagaaggaagagaatattttcctcacccctagaaagtgcccttgtgt

SEQ ID NO: 64548 - DNA, 1598 bp, Bovine  19866881264233
  misc_feature (1)..(1): n is a, c, g, or t
nctgctgcacccaaaaccaattaaatcagaatttctggggtggggccaaggtggtctttttaaaaaatctcaatgtgtattcaaggggtgataagaccagctagatcagtggttctcagagtgtggatcacagatcaacagcatcagtattacctgggagcttgctaggactgtacactctcaggccctaccccagagctgttaaatcagacccttcatttttaaaaataattttatatatgtgtgtgtgtgtgcatgtgtgtgtgtgtgcatatacttccctggtggctcagcaataaagaatccacctgcaatgcaggagatgtgggttccaacgctgggttgggaagattccctggagaaggtaacgacaacccactccaatgttcttgcctgggaaatcccacgtgcagaggagcctggcgggctacagtccatggggtcgcaaagaatcagacacgaattagtgactaaacattttttatttttttggttgtgctgggtctttgttgctgcccgtgggttttctctagtcaccacgagcaggggctcctctctagtcgtggtgcatgggcctctcattgcattggcttctcttgttgcagagcatgggctctagagctcagactctatagctatggcacttcggcatagttgggattgtcccagaccaggggtcgaaccagtgtcccctgctttagccagtggattcctataaactgccatgagggaagtccaggccttgcattttatactaacaaggtccccacggagtccttgacaaaagtgtgagaagcacgaccgtgcagcataagaggaaaggttgccggctctgggtcagagtgcctgagtctgtggagcatcctcaccacctcatagctaccaggcttcggcaaatgacaacctctgggctcctccttttgactttctcccataccccacgggggaggcttgagccaggaaaccaggggcctggtgggaaaatccaggagaacccacagcctgtcttggaggaagagattcaggtggatcctgaaacattttggaggacctcctgaagaaaatgaagacgaaattccaaatataaaatcgggtgcattaaaagcatttaaagcattctgcccctctgtctctttaaatgaacacccttcatcccatcctacatcctgacttccagcctcagaagaaattgtctcggtgtgtgtataaatggatttacaatccttgcctcgtgaaaaaaaatgaacaaagcatccgtagtagctaaaaaaataatagacgcttcaggaggttcgagagagggattacagagagtcagcacttaattgaagctcctccgttgatgtcatgagagacctggaataacgctggaaaagccgggttttcagaaggagaaccaggcagctctccgaagaatcttaaaaacgggaacaaggatttctgtttgcagggctcttctggaagccggccctttcggaggaaggcaggcaggctatacttagaaagagatgcatggcgaagagcagttctgttactataaattcatttccaaaagccaaacatatgtgtgtgcacacacataaataccatatataggg

SEQ ID NO: 64549 - DNA, 1790 bp, Bovine  19866881316426
  misc_feature (1)..(1): n is a, c, g, or t
ntgaacccaatttgccaacttctctttgcatccatgttttagactaaagctccatcttctggagaagaaatgacatataaccagagcttggcacattgactaacagtcaaacttgatttggaagtttctgagaagatgtctttcttcgtcatccaaatgatttctcattggcagctcatttttccctctttggaaagagtatcatcttggtggggcagtgaaacaagatgcatgctgttgatcacctcccctttctcaaagagagattcatggcttggtttcatctttctatttatggtttctgcagtgggagactgattggaataattctccttccctcggcttgttcttcctttgatccctcatatcattgaatcagcactgggtgttattttcttactctctggagaaatcaatttctctgcagcttttcctgtattttattcacggggtctattctgaaactccttgaatgcaaatattttaggaaatattatacattaacatcatatttttgagagattgaaagctagtcaattttttaaaaagattgatttacttacttctgtttttggttgtgctgggtctcggttgcattgggtcttcgttgctactttctctagttgtggtgagtgagggttactctttattccagcacgagggctcctcattgctgtggcttctcttgttgcagagtatgtcttagtttctgcacacaagctcagtatttgcagcttgctggctcagtagtggcagtgcactggcttaattgccctgtggcatgtgggatcttcccggaccagggagcgaacctgtgccccctgcattggcaggtggattcttaaccactagaccatcagggaagccccggttttttgttttcaaataatattaatttttaagtatagttttaggtttaaagaaaaactgtgaggatagcccataaaccctgcatttagtttctcctaatatcgtaaattagatagtatatttattacagctaatgaaccagtactgatgctttattatttattaaagtccacacattattcagattttcttagtttttacagtgtcttttttctgttccaggatcctgtattacatttaaagacatatatttatttatttggatgtgccaggtcttagttgaggcatgtgggataattattggtgtgggatatagttctctgaccagggacggaacctgggccccctgcattgggcacgatgagtcttagccactcgaccaccaggaaagtccccattgtacatgtaattgtcatgtcgccttcggctcctcttgactgacactttctcagattttctttgtttggatgacagttttgagaagtactagtcaggtatttcgtagaatgtccctctactgggatttgccttgtgtttctctcatgattagggttacggggcttgggggaagaagatcatagaggcaaagtgtcatttttaccacatcatggcttatcactgtggatgctgaccttgaagcagtgtttctcaggtgaagttgctcaggtaactttagagtcccccaccataaaggctgtctgtgaccttgggtggctgttttgggggggaaggaagagcacagagctttgctatctgtcgtgattggtgccgcatagcccggctcctcctggccccagcagagagaagcaggggggatgatggggttcgtttgattcaatctattttatgccactgtggggaaaggatgacctgggaacacgatatgaaaagatatgaaaagggagtcaggaagccagagt

SEQ ID NO: 64550 - DNA, 711 bp, Bovine  19866881778115
  misc_feature (1)..(1): n is a, c, g, or t
naatagtcctctcgtatagtggtgctgtctctccaacaaaagctttgaatgttctgttagggtttgggggtattttatgtgtgtgtctgtgttttcttatctccatttgatttctttttgcctgaaaccccacactgattttcaaggaaaggagaggtaaagtggactgacatccccaggcttttcttgctggaagattaggcgcatgtcctaggtttataattagcatccagaaaaatggattgagaggtatcagccagaaggagagaagaacggggcaaatcgcaggcctgaatgacccctgggattctggccaaaaccagggagcaatctttcctggaaccccaacatctgctattaatcagaaagcttcctggtaatttgagtcaacttaattaattagcgcatcctcttttatagctcttggagctttaatcctttgagacagcgaacagctctgagttgcttaacttacctagacgcttcttttatctgccacttcatgtggtagtttttagttcctcttctctccaaggtgtgcccactggaccctccagggagaaaaggctgatctggagagagtcaggagtggagatttatagggaggtggggagagggcatgtaaatgcctctgaaaaataaaatgagagtgggaagaagcaggatcgagcaagtgacgggctcagaccatgatgcacagatagtggaacg

SEQ ID NO: 64551 - DNA, 2456 bp, Bovine  19866880291816
  misc_feature (1)..(1): n is a, c, g, or t
ntagttgctcagtcatgtctgactctttgtgacctcatggactgtagcccaccaggcacctctgtccatgggatttcccaggcaagaatactggagtgggttgccattcccttctccagggtatcttcctgacccaggcatcaaaccctggtgtcccacactgcagacagattctttactgcctgagccactagggaagccccaaagggagaagcatgattctcccaatagtaaggagagataactgagctcagttttactttctgctaagttcctgctaaggagaactcaacagtctgctattgtcctgaaagaagtctagtcaaatgctgactctggtagatgataggaaatgagctctcaagtgttgagaaaagttttgacagcctcccagcaacatgctccccacagagccaatctcaccaccaccctgaagctgccaacccagtgcctggggagattcccacggaagcagatggtgctgcctggagacgactgtctgaagcttgcatctgggctcctaagcactgcccagctgagcaccctgcagacagaatgcccagcagtgggcttcccactgcaatccattagtgccccagcacagcctattcttctttccttaaaaagggacttgttctccttgaaatcatatcagaaatacctgaccatgaatatgtgcaaggcaaattgtagcctttaaaatgactaatataaggatggaatactgttgataaagatggggtcacctatgtaatgaaagctggtagtaggagccagtatcattatattagtatgtagtattcggaaaggggggttttccatgttgtttctctccattaattaccttctgaccaaaacatatctctccttgatgaaactttagttgctgctgctgctgctaagtcacttcagtcgtgtccgactctgtgtgaccccatagatgtcagcccatgaggctcccctctccctgggattctccaggctagaacactggagtgggttgccatttccttctccaatgcatgaaagtgaaaagtgagagtgaagttgctcagtcgtgtccgactcttcgcgaccccatggactgcagcctaccaggctcctccgcccatgggattttccaggcaagagtactggagtgggttgccattgccttctccaaaaacaggattaagacaggagaaccctacatactctgtcctacttgaggtcaactgcatatttacatcatgagcaaagattatgagaacaaagtgacatctctgtcacattaacttggctccattttcattttgtagctttgtttgtatatattcttatttacttatttatggtatttaaaagctatggcatacagtatgcctaattttatattatatatttaaaaaatgagcatgccaacactcacttttcagaaaggaaaacatactaaaacacacacgtatttttaatgaaagttaaacaacagataacactatatatctggcaaacacctggaatgcaggtatctacatacctcctcagaatgacccagatgcccttgaccatcatttgagtgaagtgtacaatcaccaactcttataaaacagagatgataggaggtcaagtccccatgtttgaatatatacagcagaactactatcattttatcccagaaacattttaaagcaagtgacatcaatcaaccaacacaacagtaaaaaaaaaaaaaaaataaatctctgaaagttcccataagaaagctgatatcaagtaatgtggatgctgggtgaacctattgatacagacggattgccaaacgtatcacgatgtaatggaatgatttgacccactatgtagaatggttgaatctaagccaattaaattttgaaggacaaatgccaaaaaagaaaatgaaagctgatcttgagcccttttttctggtagcagtaagcgagtaggaccgattgcctgctgagatcatcgttgctacgtgatgagtgcagatagagagagcgcaccaggaaacatgtccagcaggcaggtcttacacccagaggggttcccagtaaatcctgagcaatgaaaatgttctaacaacagtggtctcctctcccaaggtgatttatttgaagggaataaatacctggagagagagctatattatttttgtaagtaaaatgataagggctgatcctgtgctcattatcaaatttaaactgctttagggctaagcactaactgtattaattaatgaattaagacatgggcagatattgacccatcactgcgggtgacagcatcattctctaccctaaaggcaaaacacacatcgtctcacaagtctctcctctgaggacacataccccagcatacctactgcaaatcatcatgagtcaagtcctccttgctgggtttatttatttatttattggccacacccaaaacatgctggatcttatttccctgaccaggga

SEQ ID NO: 64552 - DNA, 1733 bp, Bovine  19866880424099
  misc_feature (1)..(1): n is a, c, g, or t
ngtgggctgcctctctggggtcgcacagaatcggacacgactgaagcgacttagcagcagcagcgggggaaaaagcaggttcgcttaaccacaaaggaagcaggcttgcttagctacaaaagcacgtaactctagaagtatgaggcatgccccaaaacagtaaaacaatggtggcgtgagactcacatactgcccagtgagctcagaaagttaatgatcccttagacatggtctctgcacacataaaatgcaataatttgtggacctagcttggcacacaaggacaagaaaactcccctggtcaacctggaagaggagctgatgatggaaacatgacgtttactcaagagagataaagaaggtcttctccacctccccggttatcctttgattataaacctgtagcccagtaagttctcatggcacagcatttctcacgtgcctgcttgtaagcctataccaataaatcatttcttagctaccactttgctctccctaaatttttctctgcactgagacataaagggttacataccagagatctttggagcccctacatgacaccaaatggtttcagagatggacttttagcattatccaattatagcaaaagaggacaaaaccaactctgacttctctggagtaatcaatcgattttggaaataattcaacatagatcaatattaaatgatgacatgatcatcatttaatgataccatggtatattttattcagtattttattactctctcctatggttttattattctatttaataaacacttatgtctaaacagttactttgccaggcatacttctaagcattttacaaatattatttcatttcctcctcataataaccttatgaaatagatgcaattgtcatcttcattttgcagcttgtgaatgctggcaggttacgtgccttgagtttctaaaagagtttaaaatgtgtgaaataaagatattcaaaaagactctagatttctctaaaagtgacattttaaaacacaaataagtaaacagtagtcctatcagcataaaacaggctcaggaatctggagacaaaagtataaaatagcccccccaaaaattctctaaaaggccaatccctaattattttaatgttacagactgcaactaaaatataggtgtgtgtgcatgcgtgttaagtcacttcagtcatgtccgactctttgagaccctgtggactgtagctccaccaggctcctctgtccatgagattctccaggcaagaatactggagtgggtggccatgcccttgtccaggggaatcttcctgacccagggagttagattcaaatgccagtggctttcaggctcacattccagttctcgccaccttctggagttcttactctctcactctctccttgtctttgttatctccttctctgtctcacttctctctgactccctcaaagaagtaattaccagaggactctcctccctctgataaactgagggggctaatgatgagattgcaggataggggtgcccactccgcaaggatttacttcaaaggcacagcacatcaaagggacttgccaggaagccctgagatcttgctgagctgggctggccccttctcctctcacctccttgctcaaacttccacttagggactacagtggaaggtatttcatagctagctccagacggctgccttgctctgcaccatccggggagagtgagagattcataccatgtgt

SEQ ID NO: 64553 - DNA, 1253 bp, Bovine  19866880429248
  misc_feature (1)..(1): n is a, c, g, or t
ntggtataagagactaagtattgcagtttggcttatcctgtcccaagttcagtaaaatctagacatcataaataatgctatataaattaatcttgattgacctacaaaagtatttctgcaacttacgtcttctcaaattcagttccattctttaacaccattccattaagctttaacgtgtagtttaatgcttttttctcccaagtgtaaaatataagctaagaaataacatgcttaaagcagcatttttgatctggcagtcttcaattttgcagtcaggaatgtgttcaacaggccagagatgtacaattccctaagcaggtgaaaaaaacgtgattgtgagatgacagttttcataccattttcaatgcacattttgtgcatcatttttatgcatgggagtttgtttttatatattttttggagaaatttaaataagcatttctatgtttagcttccagttattgtaagatatatgaaataaaatatggaaattaaaggccaaggagatacttatctaagtgaaaagcattaagatttcaaggctgattatgaccttcacgaacttttgtcagtcttacgagtgtctgtctagtgatgaactcactctccacaatgggtcctgaataggactttgtgtttatgtgtaaagtgaataagttcattcatcaacagcttgttgctcatattgtttacaaatattttcttccattccataggccgtcttttgttgatggagagaaatgtaaaaactttaggaggatgatgtgagtgttaaatgacagaatacattactaacgtactttcaacaattttagacacccagccatcgctaaaaacacacaagtgaccgttccagtttttcttgtttacagaggacaatgcaatgagtagggaatcagtcatctagccaggtttgaaacccaggatcccatttcacagtaattttcaatcacaggatgctgagatatcaggtacccctaaaagtgtaatacatgtgattcatgtaatatcaacacatccatacagcatagacctagtacctaagccctcagattacatttagatgtggctctaagcattcagttccacaaagtaaagagtaactattgtatttgctcctaagatgatggtctaaggggcttccctgtggctcagcggtaaagaatgagaatttaccatgggattctggagaatcccaggacagtggagcctgggggctacagtccatagggtgcatagagtgggcacaa

SEQ ID NO: 64554 - DNA, 1476 bp, Bovine  19866880490097
  misc_feature (1)..(1): n is a, c, g, or t
ngattgggagcagaggagaaggggtcgacagaggatgagatggctggatggcatcactgactcgattgacgtgagtctgagtaaactcagggagttggtgagggacagggaggcctggcgtgctgtgattcatggggtcgcaaagagtcggacacgactgagcgactgatctgatctgatctgctctgatctgatctgagcaactgagcacatgcacacatcccaggtattgggcaattatcttgattgctgcaactattgtgactatgttcataattatagtccaggtaaataattcgaagaaggctgaggatagaatgctggtaaatactgacactaaaggctaggcagtgacagagaataataaaatataaatggtcacaagtaagttgagaatcagcagaaatcatatcccaaagcagaggagaaatgttccaagaaggtggctgtggcaaaggaccaaatttcaatagtctgatggctgagaagagggagtaggagctaacattttagtgatcatggtttgcatttggggacagcattttcagtagaataatggaaatagaaatgatattagaggaggcatcagtgaatgttgatgagaaggtagaagctgcagagaactagctgctcttgaggattaatgggccttgaaggaagcaaatgggggactaactggaggggccaacaggacccaagaatcttcttatagacaaatggagaggaataataaagacagcaggattgatctactggagataaaacatccctgatgcaggaaagctggtgggaggggatgagctccaaaagctagggggcccttgggagggagggagcccaccgctaggcagaactggagggagggcttccatgttgatctgactctgcattgaagttttgtctactgtttggtaccatacatgcatccctattttggtaggggtaaataagtcagacctgatcactggatcactgggataatgccaccatgcacctgtaggttctgagctcgttcccagtatttggccacaatcagtagttccaggactactttataaaatagctgtggcttttctgaacttaggaacatttcagagtaatgtaaaaacatgacctgtttctacaggtcagctttatttgtatcttaatccagcatgagcaagagagcagagaatgaaacagagatgatgcagggccttatgtacatcgcaaccccaccttctcacccatcctcaggcaaatcttcctcagtgaatcctttcatcataataccaatcataataagctgtttaagcaattatcccacactctttctggagtataagatttcttaggagcacagaattctacccaagcatagtcacactgacgtcagtgttcagatcagatcagatcaggtcagtcactcagttgtgtccaactctttgcaactccatgaatagcagcatgccaggcctccctgtccatcaccaattc

SEQ ID NO: 64555 - DNA, 1195 bp, Bovine  19866880498373
  misc_feature (1)..(1): n is a, c, g, or t
nttctcaacatttgatttttaaggaaatgcatttaagtttctagtatataaagacttattttagtagtaaatcagcatagtttattctaattataaaaaattatgcctgaggtttaaagacaaatgttagatcgatatcataagttttatcaatgagcaaaagagtatataaagccaaaaaagtccaagtgaattgtgtgaataccagaaagtgcttgatataaagtcacctactggctctctgactcccagtacacaatgacacctactcaacttcaccgtctcgcttacatttgataaaacaactgtaacaaaagaggagtggtttcttgactcttggagaattcacagggaaataaaatatcagaccctaatctactgcagagagaaaaagaacataataatgagaacgaagtcaatttcacaataaactcatatgtctgtatggaatgaaattggtgattttaaaaagtgcaccatcacaaaataaattttacatgacagaaataaaggagcagaggaaataagaaatgtattaaaaatgcatcattacaccttacctcaagaatacattatagtatctactggtttaacattatgtgaaatttaaaaataaaaaagtgccttgggtatttctccttgaagaacaatcacaggtacttagatgataatgagactttgcaaaaccaatggaagccatgcattattacatgaacagtgttagtcatctcacagtcaggttctccaagaaacgactttcctgatgaaaggatgaccactgtccacatccctccatctcttggcttgtagaagaaacactaattagaaacactaaccacattaatgataacatggttggtcaaaaataatgtccttgatacgtttaataagaaacatactgaatttaaaaacttctcttggcagaatgtgctcaacatccatggattcattaacatgctctgcaacagtctggggccagaaaaatcaacagactcctctagctaacaccaattcttcatctgattcttattcatgattccagactttaataaagttcaacaaagtattccaaactacttcctctcccttctccactgtctctgaaattcttagtctttgctctcctcaatattccattctatctagaaaccaaaaaaggactaaaattgactgcagagctcagagaatgaactat

SEQ ID NO: 64556 - DNA, 2085 bp, Bovine  19866880583228
  misc_feature (1)..(1): n is a, c, g, or t
ntcgctcagtcttgtctgactctttgcagccccatggactgcagcatgctaggcttccctgtccttcaccatcttctggagtttgttcaaactcatgttgattgagttggtgacgccatccaaccatcttatcctctgtcaccctcttttcctcctgccctcaatctttcccagcatcagggtcttggggatgcagatttcaccatgtggccggaccagagtgtgcaaagcctcctacctggggaagaactggtccattttcacccctcctgcttcagcttgtgacccagcacctgggagttaagtaggggcagaagcttgtgggatgagattacagaaagtaccttgctcccttcccttacataaaagagagcagctagaacactaaggcaggtctggagtatttttggttgcaccatgggatctcagttccccaaccaccacggattgaacccaggccatggcagtgaaagtgccgaatcccaaccactagaccagcagggaactttcaagtctggaatttggatatcttgaactggacattcttatgactgcatgtgccactgcattgtcttaaaatgatcagagtgaaccgattacccaagaataagcaactaaagaaaagagaataagcaataataataccttacaatagacttttcatccagaggcaaagaaggatcatatttactgaatgcagttaaaagggaccttggagacaaaaataaagatatgtaacatttgtaaaacaatgcagttatagaaatcagtctattggtaacaaaacaagaggggcttcccaggtggtacagtggtaaagaatctgtctgcgaatgcaagaaacttgtgtttgattcctggctcaggaagatgccctggaggagaaggcaaccactccagtattcttgcctggaaaattccacagacagaggagactggagggctacaatccatggggccacaaagagttgaacatgactgagcacacacaacataatgagaacacacagaaaataaccccccaaaagccaggcttgttctgtgatggtaactcctcaccaggttagtatcatatgtcctggctatcaagcatacttctggttcagcttcctgttttccttttggaagaatccagaggtgatgtccgcgtgtgctgctttttgatctctttacattgggagagtctgatattttcaaggccacactccacagcagtctgcaagtttgaacttgccatggaaccagatatgcaggcatctaaaaggcccacgctgcaagaacagcagctaaaaatcttctctctttccgaaagtagagtccagaccatttatcacagtcagaggcaatgcatgagatgactgtaacaaacaaatgaatgagtgcccgataaatcacagtagcttgattaatcaataaagatattgattttttaaaagtgatctttcgcatcccctccccaccctccaccaagggatttgcacaggccactgaaagataaatgtgtctcccattctttggggcttgtatttgacccagtgtaataggaattgatcattatctaaatgttgttttggctagaacgttgtaatttgctgtattacaatgtctaaagtgttgcttgtacaggtaccatcctctgtgattgcatctttttatcataaagactcatgcttctgatcaggaatccccctggagttctcttttcccagttatatgttgaagaacaagaaaaccaataacggaaattttcctgacttaccagaggctacatgtgtgaagactattgtttgccagaggctggtattttctatcagaaacttacaggaatgaataggccagatcctgtggtaagatgcccagtgctttatgtttttcccaaggaaggaaagattcttcgatccccagtaggaagcatggattcttctcataccactggtactggagatcatggttatggagaacatttgcatgcttttcttggtgggaggagatgggagccagtcccccatccctggcacattccagcttctttctatctcctctctgccccacactgaggagctctcagccacttacatcagggag

SEQ ID NO: 64557 - DNA, 3568 bp, Bovine  19866880626404
  misc_feature (1)..(1): n is a, c, g, or t
ntgtttataaaaaatccccgagtgcttgttacacaatttgatttctaagcctcaccccagaccttctttatttctagtgaaagcatcttggaatgcgtgtttataagcatcccaaatatttcttctgatcaggcaacttggataaatatcgcttgtgacaaatggaagtcttttaaattcccctgtccttgtaggtcagggattctagttttcatttttaagtcatagtctgattgtgctctgattcaggctttgagaagtcataagaaaggtttactatatttcttctagatagatgaggaattaaacatagtggttctcagctgggaagggtagtggatttttattccccaggcagcgtttggtgatgtctggaggcaggtagcttagtgataaaaaatccacccgccaatgtgggagacgcaggtttgagctctgggtcggaaagatcctctggaggaggaaatggcaactctctccagtattcttgcctggaaaattccgtagacagaggagcccgggctataatccatggggttgcaaacagttagacacaaatgagcatgcatggcacagaggcattttggggtgttatactggggctgtgggtgctatctgtgtgcgtgtatgtgtgtgttacgtcacttcagttgtatctgactctttttgaccccttggattgtagcccaccaggctcctctgtccatgggattctctaggcacccacaatctacagtgaacaaaacctcctcccacaaagaattgtctcattgaaaatatccatagtgctaaggtcgagactctctggttaacccttaaggtctgtctgtattaattaaattaaattaaacttaatttaactaaagtcaattaaggcttaagttggggtataatatatatcttctttgatcaccatccatattaagatgtagaacatttctccataaaagagtaggtcaagtaaaagtaaagccgaacacttgctagactttgaggtaggtccacctcaaagcctttccctggtggctcagacggtaaagtgtctgcctgtactgcgggagacctgggtttgattcctgggtcgggaagatcccctggagaaggaaatggcaatccactccaacattcttgcttggaaaatcccatggatggaggagcctggtaggctgcagtccatggggttgcaaagagtgggacacgactgagcgacttcactttcatgttaatgataatggagtcttttttctattttttttttcttactaaatcatacttcaaagattcctttaaaatggaatcagaatgtaaaagcacttatgagttggtttgactgtcaagtcatcctaaagttttgcaatttttctcatttgcctttatggctgtttcttctgtacttgatttgatagcagttttttgtttcagtgacttgcctcagtcctgtaagacattttttttttttaggaaatttttatcagtttatattgtaattacttgaatatgattacagtagcagctattgaatagctgtatagtgagtacaaacaggactggggacaaacacaacagacttaaagatttaactaggggcacggagaagcttccctgcatggaagatgggcccctaaatactagttggccggagctgtgggcacatgggacttgcatgttttacagaggcactgaaggtaagggttaagtcattaacttatttacgggaaggttgattgagaaaggtccttcagttttcagtgagtcatgggtggatggagggagagaaaaccagatatttcaatctttttgattcactacatagaaaccgtctttactttctctaacttctctaaattagacaatgaaaatttaaatttggatttttcgccagttcatattttctgaaaagaatcagaagtagattaaaaaagtaactgtatatttaattaggaaaaacaggtgttcatgtttgcatttttcctagatagtacttaattttcaaagtagaaggaatagtttgggattagatagatgaatctgacaaatgtaaaagactatatttgagtacgttttcaatgtaattatgtaaagtaccttgcagatatatttcaaaagcaaaatatatcttttaaaggtgtgtacctttaggtcaaatcgttgtaaaccctgggaaaaaggaccagggacttgcagcctcttgtcaggtcttgcttgtctgtatttggagttagccttgtaccaacatgccagattccacccataaattctattgaaaagtggtctgccaatttgaagctgcttgttgcttaataaagtctagcagcttctttctatatgttttctgtagaagctgaatacatataccaagataaaagtctgtgtttaattttgtaaatgatagtatcttttacttaaaattcttcagttaaaagttggaagcaatttttgcatgaagttttaagtccacatgaacaatgtttttgtatattgtagaagtcttataaaaacttaaaatggaatatctatgctaacattggtatcaattttaaaaactagaaagtaccatattaaataatataagtagatagtttaagctacactttggaatagtagattatatacttaatcacaattgagatttattttatgatgcacttttagaaataactgtatttcacaaaatattccttttgtttttgtttttgcattatttattgctggcaattccaagtatcagaatccccttatgatttttctttcttttttttttttgatttttttcttgttcacatcattaaatgagcatcttttaaaacagaaaaaattttttcttcctagtggaagcataggcattactatatttataattaatattgttgcaagaaaattaaataacttggtttaaatatgtctaagtggaactcaattatttggcagtagttgggcaggaaaataggaattggtgcacaatccaaatctgagttttaattgtataatttattgtgttgaaaacaaaagttatgatatatgaaatgtattgcttattagagattcttagggaatttggatttgaataaccaacaaaatcttgtagccagcttaactctaagtatgcctctctatgcttaaggatacttggaaacaaaaactggtctacctaaaaatcttatttatattattcataaagaagtgtaatatcagatttaattaattcagaagtctttcactgtgactaatttttggcagatgcattggagatgtgaataataaaacttgtgcaagctggtaagagttttaatacatttgaaaataattttcttgaaattttgctttttttaatagagaagactgtaatttactagtaccagtattttcataattctcattttatgtgttcattaaacctgtgtgtattgaattgctacttttacatcatagtggtcacagttgccattcatttcttgtgccttttgcccttgttttttcttcattggtttgtgctgtcagatttgccatcttagctctagaggtgtacttcatttaatgcaataacaagaccctaagactctgcatgtat

SEQ ID NO: 64558 - DNA, 1244 bp, Bovine  19866880697370
  misc_feature (1)..(1): n is a, c, g, or t
natgaacaactttatgtcattcttaaaattgagaaatgctctggaacttgtaatttcatactattttgcctttttctctgtttctgttatcattttttcggtacatcattcctgaatagaagccagtttagattatgtatggagttgagtgggagagctaaatttgaaggtggaagtacaaattaaaattagtcatcgtcgggggaaatattgaaatggttcttttttctggtcttttgttttcacgcagtgatattgtgcctccatacatgtaatcagttcttctttatctaatatcatttgaaaatagacgatggttaagtaaattaaatttgttatggaaagggtcagaatgtagttactactctgtcctgtttacacttttttcccctttcttttaggttatcaagtattttgttcaaatgagttaaagtagtctgtttttcttttttatgctttctacatcatcatcattttttctccaatatcaaggctttggaaatggagatatattactcttattactttaaagtaagttcttacatggagtaggaaatggcaagccacaccagtattcttgcctagaaatttccatagacagaggagcttggtgagctacggtccatggggttgcaaagaatcagacacgattaattgagcacaagttcttgtattgaacttatattgaacttcgtcactttattcttccagacctgactagaagtaactcttctatttgaaaacatcttcaacaataaaaatagagttgaagttgtatttgaggatgggtttgtatttctgtttgtttgattttaaacctcagctttccaaaacaaacggttattttgagatttatttgtttttgtttgtagtcagtgagagtcttatttggagctactctcaaattgtaaaaaaaaaaaaaaaaaagaatttctgggacttgtctggtcagcttaactaagcttgagtttaatgtaatatatatataggtcattatattgatagggatttctgacatggagaattgtaaatggaagtgagaaaaaaagttgttgaaccagtaagagaaacaaatctctaaagaatgtccagaaatctgtgggtattttgatttattaggtgagcaaaatgaagacatttgcccttttccatggaacaagtagtcatattttgtatattttggtatctagcccatgtttcactttgacttctttgccaactgcacatggatactttgtaggaaa

SEQ ID NO: 64559 - DNA, 1919 bp, Bovine  19866880763132
  misc_feature (1)..(1): n is a, c, g, or t
naagagaaaaattgataagggctgaaataaaaacagaagacaaatatttaaagtcagtctcaacaataccacaaattgatttaaccatcataaaagataaataaaattttcaaataacaatatcataaatgagaaagtaagcagagctacagatctggcacattaactattgtaaacattattagcaatttcataacaataaatttgaaagcttaaataaaatagacaaatacctagaaaatattataaaaatgtctttagaaaagtaaacctacctgaagagtcctatattgattaaagcagttaaatatctctcagagataaacatatggttttgtaggtgaattctatggaactaaaggttaaaaatgcaatttctagaaacaattccagggaaaagaaaatgaggaagtactcactgtatctttcaaagaggctaataaaactctgattttgaaaatagataagtgctgtataaatatgtgtgtatggctgagtcccttgaccacatctgaaactaccacaacattgtttgttaatcagctataccccaatacaaaattaaaagctattaaaaaaaaaaatttataggtaaatctaagccagtagtagttttaagattctaaacaaaatatgagtaaatcaaattcaaatataaataaatacatatatatatatggcaggaaccatctgagtttaaattaaaacatgaatatttgatgcaacattagaaaatattttaatataattcaccaaattaagagattaatggaagattatctcaaatgcctcaatgaatttgtttaattgttataagtcactacacatttattattttttacaaaactttaataaactaaaaataagtagcatattgtttaagggtatacctacatacagttcataatgagattggaacccgtgacaaagatgcagtagggagacccgtttctcagctctgaggaccccaagatcaccagggtgtctggcctttggatgataaaccttagaatggctactaataactaagcccttactttgtgtctgctattttacatatattatttctaatcttgacagtgatcctagaaagcatatactttaatcccctttctaaagatgtagaaactgaactccctataagttaaataatatccccaagtcacacagatgataaattacactcagaatgttaatccagttgtaactgaatccagaacctgtggacttcctaactcttccatcacattcataaacacaaaaattcttaaaaacattgaaaaatcttttgatatttggcaaaactaatacaattatgtaaagtttaaaaataaaataaaattaaaaaaaaaaaacattgaaaaatcaatatctgtaaaaacagataaccagcaataaataaaacgagagtggatctgggttaaaagcatgtttgtttgttttttagaagtcacacagcttgcttttacttttaatcaaatctagattcgattttaaattggctttcaacaagactgaactaagtcactttacaggtctattttcttttctgttctccctgaagaccaacttggacctgacatactaatcagtgtctgaggattggcagaataaattttaggtatcagaggcttgatagcctttctcacgaacttctagtaggaaaaaattctctgtgctcagcgccaccaaggtaaaagcaagagacaattggctgtgctcccgctggttgaccctcctctcccctaaagactctcctactctctcctctttgagtaaagttctatttagagccacagcaaacatcggtttctattgaatgtcttcagaaattttcaaggtaaacctaaaatttagcagacctaatgcagttgggagaaggcaatggcaccccacttcagtactcctgccggaaaacc

SEQ ID NO: 64560 - DNA, 888 bp, Bovine  19866880837433
  misc_feature (1)..(1): n is a, c, g, or t
ncccacccaggctccttccctgcagcccacccaggggagtttccaggcaagagtactggagtgggtcactagtgccttctccgcaagtggaggctaatacctctctattcccaacttgttgagagtttctatcatgaatggtcttggattttgtccaatgctttttctacatcaaataacatgaccatataatttgattagttttttttttttttgtcttcagagggaaaggaaaagaatcagagtctgcattgggttctgtgtgtttcagctggaaataacagtggtttattgcagttgcagtctgaacacgttagaaagtaaatattgtagatagccctgcaaatccaaagctgtaggaggtttagaaaaagatgggttttagcagcatgtgtaacaatgatgacagcactataagtctaatgttgcatttttctaactcccttaaacatgacattgggcatgagtcaatcatatgtttcaatctttagagaaaagaaaaaggtattttgtatccaaggtcttttctattaccctgtttgtactgtagaatcacgtaatgggtaggctgtgtagaaagtaatctagatttttattgtcaactgtttataatccaagttcacattcttaggaagataagacaataagacataaaacaaatggttagcaaaaattctccacagcctgacataaaatggacttttggggtccatttgtgctggaattaggcaatgcatgctagagaaagtatcttccagatcaacttcaggtcttgaaaaagttgcatagaaaggacttcatttacattctgtgttattcatcatcgttcattcaggcaacattcactggtccttctgggcggggcttgggctgggaagtggaaagaat

SEQ ID NO: 64561 - DNA, 1301 bp, Bovine  19866880866099
  misc_feature (1)..(1): n is a, c, g, or t
natttctgttctatatctttctcatccttgcttccgtacatgtggaaattctagaatatgcgaatatactgtgggtgtggaattaccaattttagtaaataaaaatacaaggcacccagttaaatttgaatttcaaataaatagtgaatgcatatttagcataaatatgaccccaaattattaatcatttatctggaattcacatttagctaggtgtcttatatcttatctgataaccctttctgggtggggggaaaatggaaagatttagaggcccaagacccgatcagttgattttatgactgtttcattctcgtgacataaaccctggactttcaacccatagcccccacttttatcacttaacttaggtctgcttgtctgttttaccttctcccccatctcacccttgctttcctcggagtcaccaaagctgccgtggtgtatcctcctgcttctcgctgggctgtaaggagtgaagatctgctggttttcttgattgtgctttttcctgcaggtgaaggttaccatcctggctgataatgaccccagctctcaattccactaccttattgaggtctccacgggccatagaagaagggcctcgacgacagccaacgtgagtgcaatgaaggttcttccctcactgctcggcgctctctgccatgcgagctgcactccgatacccttgctgacatcctggcacccagtcatccttcacacagatcctggagggtggtcgtcctggttctcaactctccatctaggccttctctgacgacccaatggttgagactccatgcttccactgaggggacgtgggttcaatccctggtcagggaactaagatcccatatgccatggggtgcagccaaaaaccttttaaaaattgtacatttgaagagccctttctgcttgtctaagaccccaggacctcatctcagtacagttttctctgtcttcatctttccccttagacataaatcaaaagactcatgttataacttgccgtatcttatcttttctttgtcctggtttaggtagtcatcaccctttatggatcagaggggcggagcgagccccaccacctttgtgactcccagaaggcagtctttgaatgcgggggactggatgtgttcctcctgggcactccatcctctctgggggaattacacagcctgcggctctggcatgacaattctggcaccagccctgcttggtaagtacccgaatcaggctggtgtgctgcttctctgcagcattctggggaaagacctgcacggcatcacagtaaataacta

SEQ ID NO: 64562 - DNA, 1007 bp, Bovine  19866880887983
  misc_feature (1)..(1): n is a, c, g, or t
ntgaagttgaaactctttctttcctcccaccttcatccctaaaactgaaactgtattccatttgacaatcttccagtaatgtgacgcacacgtgactcagagcttttcatctgccatggctacagaatgagctctacctgactgtgacaactgtaaaaatggcacttgtgaaaataacaccaaatctggagataattagtgagcacaaatagataaacttgatgatttctgtacttacctatgtgagaaaaaactcttggaaatccaacagtttttgccctagcaactgtaacgctgattccaaacacgacaaatgagtaagtaccagctcgttaaaaataatttgttattaaatttcatacccctcccacacgctactaagaatagctaagtttcacttaaagagaaagggggaaaaagaaaaaaacatgcattcgaggacactggcacacagtcccccttagaaaatgaaaccgaacagcactgctgcgggagctgaaagcggggttttgtttctctctcaaccacagcctgtttgcaaatcttcatttctacttttgtggaatatgtttgctattatataaaactgatttcacaattgagactcacacatgcatatctccagatagatggtaacccagaaacagacaattcctgaatacagaatttagtgtccatgatgcacactctttttactaaatggagttatgagcttcaattatatcaaagaattatatcaaatgcattcaattatacaaaatatatatcaatactgacacttatcaattatagcagaggctagagctgggtatcagtacctagatagggtacctagataggtaacaatgccaggttagcataggctagagctgggtatcagaacctagatagggtacatagataggtaacaatggcaggttagcataggctagagctgggtatcagtacctagatagggtacctagataggtaacaatgccaggtagcagcaataatggaaacagtgg

SEQ ID NO: 64563 - DNA, 919 bp, Bovine  19866880904015
  misc_feature (1)..(1): n is a, c, g, or t
ncaaaaaaggggaggaaggatgcatttaaaatgtaaggaataaaagataaataaatcaaataaaatgtaaggaatatacatttaaatgggaaaaagatgatgcgaagccaattcaagtcaacaaatataacctactttattgttcctttactcaaaataggtattaaaaggttctgggggctatcatttctatcagaatgtaatctcttacaagcttaaaaataagacagtagccttgagaggcaagaatgaaggtcaagcatcttaaaggcaggattactcttgggcaaaagtgtttagaaagctgagcgtgtccgtattcttctgccccttctttctatgtcttgtcttcacatcctttggtgttggctccttagatgccatggccagggaaccctctctccaagcgacagtttccccctcactcctctccaggacctcatgccactagggtttttcctctctcccaaactcttttccctcctctgggccctactctctgatatgtattaatgaatgtcagtcacttattaagtacctaaaaaatctgttaatgtgatggctaggtaactgataaatttattggacagcaatgttttaacccttaaagatgaatacttaacaaatgtagtcagttataggcctggctagtggaggggaatatttttgaacaaaagcagtagttttcttctgaccctttttcctaagagagacaatgacacaaatctgttcaaataaattaatgttgcctttttgacgactgccccatatggcaggaagaggtttagatgccaactgacatgccccaccaatcccttcactgtgtatgtacacaagaggcagggaatggagtaaattcaattttgtgttattcaaggggggattcattgacctatatacctgctaatttgtgtaatat

SEQ ID NO: 64564 - DNA, 1813 bp, Bovine  19866880989033
  misc_feature (1)..(1): n is a, c, g, or t
ntagtataaaattatgcttccctttgtaatttttttcctgttaatatagttccaagaaacttttgagttgagtctcttagattttgcagggtggtagatgccattagtactgccatggaacgagatgagagctacgagctaccctcaggaggtggaaacacagtttaagtattggacaaaactgggcttgagtctaacctgtgaagtcttgggaatgttacttcatctccctgagtcagtcttctgatctgtaaagccagagtgacagtgtctcttttgtaaagttgtcatgagggttaaatcaagtgagcattcctatgtggtgagctcaacacagctcggcccataaaatattcatataacagtggctattattgtttagtggaagatcattgaaggtcaacttcctctttttcctggagaagcaaatgaggtacatggaagttacatgacttttttgatatcttctggataatgaatgagagagcttggactagaaatcaggtttactaacatcaatatgtggctctttccaacagacaggtgttctcagaatttgtcattgagtataatcttcacaactttttccatatccacataaaacctagatatacttttcttactatttttatttaaaggtactctttttcacctacgtcaatttgtttagaaattgtgcatcattatcctaaataaaaattcagtatcacttttcatatcataaacaaaaggtaattgtagaattcggtgccacaaaataattttattataatttagctagatattgttagaagcaagtttaatgtcaaaaagataatagcttgagagagaaggttaaggagactagagcacctcatgacatcaaggaattggggccttggtcacaggaaacaagaaagcagaaaaacgcgaagttacctgtgtgcatgaagttgcttcagtcgtgtctgactctgtaataccctatggactatagcctactgggttctgtccatgggattcttcaggcaagaatactggaatgggtttccatgcccttctccaggggatcttcccaacccagagatcgaacccatatctcttatgtctcctgatttggcaggcagattctttatcactagcaccacctgggaagccttatggtacataagtgtaagagactggccatctgtactttgggttttagaacgtatcagtatgggcgaggtagggtacaaagacagattgtggaatgagtccttaaccagagtaaaatgtcatttctctttcggaaatgtctgaaaccatcatatgctactcatcagatttcctaaaaggatcttataaaacctgcctagtttattctactttcttccttggccatccatcccacttctctcacatcctaaggtggcttgatatcagctgtttctgttcctcttatgctaatgaatggaacctgcgtttttgtagcaagaaggcaatccattttcagtgacagcttgtaatgaactgagaggcttacactatcgaatgcatttctggtgggaacaatgggagtgcaatacatacatcagtcaaatagccaagaaaggccttttgcatgctggttagggatgtaaataatgtgtctacaggcagaacagatggtgtaaggcatgttggcaagaaaccttctcaccagaggttaagcttccagagttttcttagcaatgtgtgagtaattgttctctgtctcagtcaatattttaggaaagtaattagagaagtacccacttgagaatgtactatgtttctaaaagtgggaaagaagtaaaggaaatcatccatatga

SEQ ID NO: 64565 - DNA, 1196 bp, Bovine  19866881041929
  misc_feature (1)..(1): n is a, c, g, or t
ntccccggctgggaggatggttgagtgaggtccatggagaactaaatagggaaattctttctcaaggtgctgctcagctccagatggaaattacgttaacagaatataagctcagtgttgaccaaacttctgatttctcaagagaaaatggaaatttggatttttacatatgagtccacattttaaagtattagcaagtattttaaacatttaagaatcctatctgggctaaacaaaacacatctgaagtttggcttcagagatctaaggacggccacttttgatcttgcgcataaatatttgttgagtggccaagtgcagtcattagatactgtgcgctctttgtcacatttccttttgaaatagtgaggagagttagaatgatttggaaggcagaatttataagtcagattcccagtagtgatgattccgcagttgaacttgtttgaggatgaattcacattatttccatccagcagtatacctcatatagcgtagaatctctggatttttctgagcacctatgaaatgagaaggaagaaaatttgctgtttgcaattctacatttgaagtagagacttatttgttcttgtttagtcgctaaatcatatctgactcttgcgaccccatggactggagcccgccaggctcctctgtccatgggatttaccaggcaagactactggagtgggttgccatttctttctccaggggatcttcccaacacagggattgaatctgcatctcctgcattggcaggcgggttctttaccactaagccatcgggaaaccccagagaattatttagttggactttaagattatggctaaatctcctaagtattttctacagttcctgaacaaaatatggaaggtagcctggagcagaagtcctgcaaacatccctaagtaaactagcctctgctttgtctctcttgcctgtcccttttctgaaatagacttgtctgttggttgaccatgtaacttattgtttaatgcaggacaatttttatgagaaaggaggcgtcgttaaacttacaccggcataacaactataaaactgggccatttagggcaaacaggaacataaatgaccatagataaatggaaaagtttgtgtttctgccaagtcactgaaatggaggatagggtttctgtatataaaatgagatgttttgcagcatatctactcacac

SEQ ID NO: 64566 - DNA, 2336 bp, Bovine  19866881049047
  misc_feature (1)..(1): n is a, c, g, or t
nctgtttctaatgcaggtgtgccagtggcctgaaataaggccacatcttaagccccaggacaaaaccagccagaatctcttaggacattaattacacttttcagagcaatgaaattttatactcccccaaagtagagaggacgaaaatggcaatttggcagtgttccccatggtgtggactcaataccctttccctctaatcccaaatcaatgatgtgctctggctctgactgggacaggcctgaggcactgtgccaaaggaatccagaaggttctgtctttgcaaatgtgaatcagtgttaatctgaggtctgatgacctcaattttaatcttggtcttgctattactcagtttttataaagcctcacttttcttatctacaaaagaatgtaataaagtattgaaaacatgtttctactttctgatttctgtctaccttatttctcctgctctctctttaaatagactttaagctctgaatttcacagaactgaccaggctttaaaaagtaaggtaggatataagcctctccatgcccttccttcatattcattgcaacaaaactgacattgctttcatttttctctactttaagcactgcagagagctatggatacccgatacaaagaaaaggcaagcatgagaagagtaaatttaagatctgagaaaagggtatgaacaaaatattcatagaagactaaatatttatgagcagacatgggaatatgttgatgctcagtggtaatcaagggaataccaatttgtaatatcacatttcaagcatcaaaataattttaaaaaataatgccatactttatgctgatgagaagggtgagatttatattgctcgtcagagtgtacatacatacagtctcagtcgctcagtcgtttccaactctttgctactctgtggaccgagcctgctggggtcctccatccatgacatttcccagacaagagtactagagtgggttgctattttcttctccagtgcatcttcatgacccagggataaaacccacatctcctttgtttcctgcattggcaggtggattcttcccaccgaggaagcctagtcagagtataaattgtgaaaaactttatatagaaaataatttagcaatatgtaccaagagccactgggcccactgcccccacccaactccttttaggatttattctaaaaaatccattcagaaaattgaataaatatttctgtaattatgtctaaaagcaacacaaatacctaacaacagagagttcaataaagtatagtataatgatgggatgtcacatgatacgatcatttaaaatgacttattaaagagttgttaatattaacagaacaaaataattatgtagtagagtctaccggaagtatgctgtgattttaattatgtaagtatattttatatacatactttagtgtgtgagatcattctgtcatctttgagattgcatccaagtactgaattttggactatttttttgaccataatggctactccatttcttctgagggattcctgcccgcagtagtagatataatggtcatctgggttaaattcacccattccagtccatttgagttccctgattcctagaatgtcgatgttcactcttgtcatctcctgtttgaccacttccaatttgccttgattcatggacctgacattccaggttcctatgcaatattgctctttacagcattggaccttgcttctatcaccagtcacatccacaactgggtattgtttttgctttggctccatcccttcattcgttctgaagttatttctccactgatctccagtagcatattgggcacctactgacctggggagttcttctttcagtatcctatcattttgccttttcatactgttcatgggagttctcaaggcaagaatactgaagtagtttgccattcccttctctggtggaccacattctgtcagacctctccaccatgatgtgcccatcttgggtggctccacacagcatggcttagtttcattgagttaggcaagtctgtggtctgtgtgattagattgactagttttctgtgattatggtttgtgtgtctgccctctgatgcctctcacaacacctaccatcttacttgggtttctcttaccttggacatggggtatctcttcacagctgctctagcaaagtgtagccactgctccttatattaagcacctattatatgccaggagctaatgaaagcacttggatacatcaataaaaaaaagtgaaaaaactccataccttaagggagcttattgtataatgtctctttttaatgaaacagggattctggatgtctctc

SEQ ID NO: 64567 - DNA, 1199 bp, Bovine  19866881132909
  misc_feature (1)..(1): n is a, c, g, or t
nacacacacacacacacacacacacacaacttctgcttgaacacaatgaagtggttacacagttctctccattggctcccaaaacctcaccaaaatgacacacagaaatataaggcattaacccacaaaaagaaagggaattcaaaaagaggcaacagtagaaggaaattttgaatcaacatttggacattcaaagtaggaagggtggtaatcaaccaaacagaatggaggagattccaactgcaggacatgcaaagggcacagtgcagaatcaaagctgtcaagttcctccagaaaaagactcagagtctgcaggcaacaggtcctttgggtagggaaggtccacatacagaaactgacagaaaatctaggcagcagttagacagtgagaaactttccatttaaaagagatcaaaggaggtgctaatgctaaagaatccccaatgaggtagacttaagagactccagttggatccctgagttggtaagatcccctggaggaggaaatggcaacccactccaggtattcttgctaaaagaatcccacaagaacactgggattctggcaggttacaatccatgtggtcgaagagtcagatacgactgagcatctgagcacaaaactgcaagaaacagataatgcagggagtaaggggaaataaaactatgatatagcatcttcagagagctaggacactagaccgcagtcataataaagcaaaacaatgcaagaaaggaacagtcagaaaataagtgttgcagagatttcactgtcagtctcttcttccttagtaatgaaacctccaaattgttggaagcagttatgtgtccatctacatttttagactcttctacagataaaggtaactaataaaaagtagaaatatttaggtgagcttccaagaaaattctgttttatgacactagcagaacttcctatgggtcttccacatgatctccttaaggcacatcataaacttgtgctccaaaatgacccacccaaatgtaattttccccccaaatgctctagttgcacgaagatttaacatcatatcagccattacaagcacagagagggtggctgtacctaaactgtataatgaaaccttacttttaaatgatttggtaataatcaagaagccagaaactcatctggagtttattaagccaagaagattcatttccttacacaaaaagga

SEQ ID NO: 64568 - DNA, 639 bp, Bovine  19866881149777
  misc_feature (1)..(1): n is a, c, g, or t
nctcctttctcgggctcgcgcgtggggtcagacctcccgttcctcgtccgcggctccgcggggtccgagggccctcgccgccctctccggcgctgcagagccgctgcggccgccgctcgccgcgggcgggcacagggaggctgggcggggaaccggctgtgggcgggcgggagggggtgacttggggcggagctgattcctaccagggtgaccggctgtcacctggaaggtcggggtccctgggcttcggcgcgatcggtacccccggagggcctgcgaaaactacttcggtggaaaataacaaaaacgaaacgcggcctcgcgggggccgctcctcctccggtcgctgcagcccagctcgctgctcctcctcctactgttcccgtccctccctcgcttcttccttccttccaggctggctgcttctttaatccggctgccaccccgcctccggacgggcgggcgggcggagaccgttgtctctgaaagcttatctgagaagtcacctctttgcctctttttccggcccgcggtccccgaccgctcctccaacccgcccctcgggcagcagtcttgcgcccagcgccggccctgccccgaccaactcgtcctctctcgggtcgccgagatctccgtttt

SEQ ID NO: 64569 - DNA, 996 bp, Bovine  19866881195029
  misc_feature (1)..(1): n is a, c, g, or t
ncttcttcaccttctgtaaacctagctatcaaagaaaaacagcattcttggcccctaagaataaaagattcagataaaaatgttttctaatgagcagtatgcttagtcttacttacaggaaaggccaaaattccaatcaaccttgctaaaattgcatgcctgctaacttgagctattttgagattttttttaaagttaaaccatgtccgagttacagaagaaatatgcacagttctcttgtgcatagaaacaaagcctgatctgttcattccaccttgttatttaaattctttgaaaaattagatgaatctgataatttatgaaaccaactttgaaattatattcgatgcagcctaatgcacttgtggagtgatgtgataataatagccaccacttcttgtgtgctggtctttatgtattattgatacatatgtaattctcacaaagagacaaaagaaaaaaaattgcatgaaagtactcctacttaagatgttaatagtttgcccaaaaccactcagaatcagagccaagaatcaaaccatgtctaacaccaaagtctgagctctgtttatgaagcaatgatatttagataattgttagtgatcctaataacgtctcattttaaaaatagtagaaccattgcattttatgccataacctcagtatcttgctgtccatcaaacattgtgagaacactgaaatttgaaattattagaaacggaatttagaaaggaaaagggtactaactggatattagaggggaaaaaaatctctcttaaaaaagttccatcagccgggatgttcagatctctctgctcctcctccaaggttcagctctgcatctgggctctagaatctcccttctcaaagtgaggtcctcagaccagcagcccaggtgctcgttagaaacagacagtttcagaatctgcactttaagaagatctaggttctcatatactcattaaagtatgaaactctctgctggatgatacatat

SEQ ID NO: 64570 - DNA, 1767 bp, Bovine  19866881283927
  misc_feature (1)..(1): n is a, c, g, or t
nttagatattggagtgtaagtgaaagattagccatttattaatgattgttggagttggatgatgtgtatatttgggttcattatgccattgtcctttttatttgtgtgaaaatttccatatagatttatattttattttaaaaattatgttttaaattttataaaattataaataatttataatttaaattatatataatttataattgtattatattttaaaatcatattttaaaaattgtattaaaatttttttactttaaatttaatttaatttttattttatattggagtatagttgatttacaatgttagtttcagatgtacagcaaagtgattcaggtatgtgtgtgtgtgtgtgtgtgtatgtatatatatatatgtgtgtgtatatatatatatatctctctctctccatcctttttcagattattttcccatataggttattacataatatggtgtagagttccctgtgctgtacaataggtaagttgggttttttactatcctgataatttaccttgttttattaaaaaattataaaacattagcattttgtctataaatatatttgttcttacttcaagatgggagaccaggatacaccatagagcaatttttatcatacagctggtgtaaatcatacatactaccataattaaagtatactttcagccagataatgtgttttttatattctgattagtgatacatgaattggtaagcagcttgttccataataggcagtaaaagatgcttgttttatgctaagaaatttctaaaagttgttttacatacaaatcatttggaaaaactaatttgactaaaactatttaaaacattttaaaagaaactgaccataagactgagggatatcttaagatgaacagaataaataatctaaacattaaaactctcccaagtcatggtaaacatttgaagacaggaatcataactctaatatatgtgaaacatgaataagattataaaacaataaaataaaatgatcatcttttaaagtgccttattataaattatgtaatcattaaaacatcaaacaacaaaactgaatattgaatgaatgaatggctaaataaacaaataggtggttttttctttagccctcagtttaagagtcacacatctaattgtccagcagaaatgcacttttgaactccataaatttttttcaatttgagagtcttttaaaaaattacaggccccaaaatactacatgtacattctcccatgccagtgattgactagagctgaatgaaactaccccctttgttcgctcaagataacttttctcagcttttaccttttctttgccttcgctgctgtttttctgcttttggcttcttgctcaatgaaagctaccatgtgcttcatttgctgtttctatcagcaccgcacaggcttgtggcaaacacagaattagcctaggaaataatgggctaatttgatgggccagatgaaagaaagggcagacagaaactcaacaaaggtctcagcttccttgctttataattctggattctgcatttgctatttttgagtttctctaatgctaatttatgttattctttcgtagcttctatacttttcttaatttcttttagtttgttttgaaatattagattttacagtttcacatttggtcagcatgtctttttgaagtgtttttgtcatggtttgtgaggactttattctgcgctttctcttttttctgagaaaatgctgcataaattgtccagttttttt

SEQ ID NO: 64571 - DNA, 790 bp, Bovine  19866881341382
  misc_feature (1)..(1): n is a, c, g, or t
ntgtctttgggttgtgaggtgtcaaaggatgggctgtgtgagagagacattgaaaggaaggaacagttctcttagtgagaactgaagcgtctgttacttgaaaaggacaactcgaagataacacattctgaccctggaagcccaggctaatggctagtcctgttagtgaaatagggcaatcaaaaagttgattttttttgaggctctgctagagagtctatcaaattactacttagaataactatctcctgaccaaacttatattagtaggagtcttgttttcaggcaaatgggcaaagacaaagattagtaagctacactaaatattggctattccagaagactgtaaattgtattaccatcatcattgcagagctgggattttgtttctcaaattccctagactgaatttctgcctaaataaatagccatcagatgacattatggggcaatttatcatagggtgttatagataatcaatttacaaagcatttgggaaaattttcctggaagctgttttattggctactattagtgtcacatgtcaaccatctattattttggatttgcaacggcagctagtcttttataagaaatctaatcaatttggtgcacagaggcttattattgaggtaaaattcacacaacgaagattcttttattccaataagactacaccatggtttttaggttccatttagtgtagcaatatatagttacaattgtacataagcagggagagtgatttttgatcgataaactatgatggtttaatttaagagtatgttag

SEQ ID NO: 64572 - DNA, 972 bp, Bovine  19866881362571
  misc_feature (1)..(1): n is a, c, g, or t
ncagttttgcaggaaggagaaacaggggtttatgagagtaagatttgatgtgtttactgaagtctccaaggcaatcaagggcaagaaggcagaaaattctgactgaagtgaatgcttttgaaaggaaggaagaatggatgccagtgtttagataaaagggaaggccttcaagtagatttcttttttttttttttcttattgtcataattcatacttagcttcctagtcaatacttgatctgctaaaccaaatgcacctaaaagtaaatgattagccctaataaaaattagtcactatgtaattactgaaaatacatgttcataacagtaaaggaagctacaaagttcttttaaaactctgtctatgctgagaaaatgtttgtttctttcagggtttcattttttcaaattgctaacaggcttgctagatttttgtggaacttttcatcaacaaagcaaggtttcaaatgattttgtgaacttctatagtttgctagaggatatatttctgattctgatttttttttctttttctgcttccaaattacattttcatccacattgtgtcactctgcagtttttcccccaaagcatgtgatgcatgaaccatttgtaaatatttattgaatagcttatgatcaacaaagaccgacaaataatcaatggccagttaaaagaaacacactgaaggcattttgaatgtatgtttattctgagagaatcacttggctttgggggaatacaaagtatatgaaatgtagattctacctctagatatggtctggaaaatagaaagcacccatgaaagtggtattgaaaatcatcatggaaattcaaagttggaagaacaccaccctgatgaggttttagaaaagtactctgaaaaggaggccattgaacttgaacttcttagaaagatgtggaaccagaggctaaggccatcgtgggccaagggtacatgtgaaagcacaag

SEQ ID NO: 64573 - DNA, 1013 bp, Bovine  19866881425961
  misc_feature (1)..(1): n is a, c, g, or t
naacacactagcagttttcactgcatgaagaattagaatttgaaaatgaagatggaagcagggagggtgtggggacagagaaatttagcacatgggggttcgcagtcaggaactgaaggaggcagatgtcagaatctagcctggccttgggtagtcaaggaaacagggatcataccctgtactctcgctcccattctgaaatcccctctactcactttgctgatggcaaaatcatatcctaatataccttcccatccaggttgccagaagtcaagagagaaacatagatttatgattttaaacttctgatgagaccttcaaacaaatgccttattccttctaagaggcttcctaatcctaaaattttcaatctgttgcttataagtaaaaaatttggaggcacagaatttaaaattccgcaatggagatgcaattgacatgtcctacctcttcctagtgtgattttcttcacaacatcttcacaggtgaagacaccgaggctcaatgacttaaattcaacttaaaaacccaatatatacagcactttgctttctaaagagaaaatgatagaacaacatttgttgaggtaaattgaactgtacatatataacagagtttgaaataaaaatcaatacagtagcatttgtttaacaagaatttatcaataaccacattaagatactagaagtttccactgcataaagaattagaatttgaaaatgaaggtggaagtagggagggtatggagaaaaaagaaatttagcacgtgggggtttgtagacttgaaagattttgaagaaacacacgaagaaaaaatacttttaaattatgttgactataatgttctcctctgtccgtgtgtgtatatatatatgtgaatatgtttatatttgaatatatttaaatatatttaaggacttatatagatacagacatataattttaataatgatgtaggattataaaaagaatttctagaatactaccttaatgaaaaaaaattccacattttt

SEQ ID NO: 64574 - DNA, 827 bp, Bovine  19866881437361
  misc_feature (1)..(1): n is a, c, g, or t
ngggttctgcctcctggttgcaggtacccctctgggtctgctcctgcagcagacgaagttttcacaggccccccttctgcagcactagctggccaccagtacatggtgccttccaagcatggtcttccccccactccctaggagcgcttctctgtggatggccactggcttggcactttcccataagagtcttccctgaaacccccttggggagctttgcagagagctcgcccaggaagcctcagctatgccttctccaacgaagttggatttcagttctgagatgaggaggtaatggctgcaacagcttttcctgatttgttccttccctggtgctctcccttagccttcagtgggtgccccctatatctgcccttcttttattctcaacagttctttttaccctttactagtcaattcccattactctaattccctgttccagttaataaatgtctatattgcaagcatgcatgctcagtcccttcagacatgtctgactctttttgatcccatggaccatagcccaccaggttcctctgtccttggggcaagaatactggagtggtttgccatgccctcctccagggtatcttctggacccggggatcgaactgatgtctgcctgtgtctcctgcgtggcaggaagattctttactcactgagtcacctgggaagccccaaatgtttgtattacatggtccctattcaaattacttgtggtttgtgtctcctgactggaccctgatggatacactattcaataaatggtagctagggacttatcagttttgtgtgatctggagtttctataacatgggattccc

SEQ ID NO: 64575 - DNA, 1664 bp, Bovine  19866881561372
  misc_feature (1)..(1): n is a, c, g, or t
nacaacaggaatactattcagccaaaaagaatgagattttcccatccgcaacagcatggatggacctagaaggtactatgtttagtgaaatgttggacagagaaaaacaaatactctatgttataacttatatgtggaatttaaaaaaataaaggaatgaatataacaaaacagaaatagattcacaagacaaactagtggttatcagtggggagtaggagagggaagggaggaggggcgggataggaataaggtattaaaagatacaaactatcatgtataaaataaataagctctaaggatatactgtacagcacatgaaatatgacaactattttaggataactttaaatggagtgtaatctctgatttcaaatcatgttgtacacctaaaacatgcatgcatgctcagttgctcagttgtgtacgactctttgcaacaccatggactgtagcccaccaggctcctctgtccatgggatttcccaggcaagagaactagagtagggtgccatttccaactccagggcatcttcccaactcaaggatcaaactcatgtttcttgcatctcctgcattggcaggatctttaccactgagccacttgagaagctccatacacttaaaacatactgtaaatcaaatataacaataaaaaacattaagattttttaaagttagtgttcaacctagaaaactttgagaaactacataaattcttgctaatatgtcattaagaactaagaaattatataggagaaacccagcaaggcaacaggcagaacactgcttaggaatatttaaaatatttaagatgatatacaagacaaatgtgagtacaaaatgcaaacagtataacaaaaaaaacagaacacttggtggttgttattggcatgacaaagcatcatctctatatactatccatttatagaactgtttccgattttttcttcatccttactgccaacatttcattcaggccctcttcaacatacatgggtagtacatttaatagacaggtccaaaatgacttttagtctattttttttctaatctcgtgcttcccaaacttattatgactcactcagggatcttaaaacactggttctgattcagtctcacaagttccccagataacattgatgtaaccacactttgaataacaaagatttcatgtactcaacaaacctattacttcaaaaaaaaaagggtcttttttttggttgtgtctggtctgagttgcagcaggcaggatcttttaccgcagcccaccagcttctaatcatggcacgcaggctcgggagttgggcacctgggtttagctgccttgtgccatgtgggatcatagttccctgaacagggattgaacccgtgtctcctccattgcaaggtggattcttaaccactggaccaccagagaagcccctattacttttctaagttgtaccatttatttaacgtatgtattgcaaaatcactactaccatagtgttagctaacacctgcatcaagttacttaacatttcctttaaaattaattttaattggtgtatagttggtttacaatgttgtattggctttgctgtacagcaaagtgaaccaattatacgcatacgtatatccttttttagccctttttttggctgcgctgtgcagcatccaag

SEQ ID NO: 64576 - DNA, 1189 bp, Bovine  19866881639695
  misc_feature (1)..(1): n is a, c, g, or t
ncagtggcaggaagatttttttaccctgagccacctgggaagcccttggtgtagtgggttacagatccacaactcactcatttcacagatgaagtgaatggggccagaaagattgaccaaggtttctgaaagccacacagttggtgagtggcagagctaacttgttgtgctggccaccagttcaatgagataagattcattttaggcttgctctttgttttaacttgcatttatctttactagtttcaagggaaaatgattccattaaataatgactaaatccttctcttttaatatgttgagctgggtgtggcttcttgatgttttaacagacatgaaaattttatttaataattttgtctctccccttaggcaactctctgcctaggtcctttgaaattacaaaactaaattaccagcgggctcaagtccagcaagcatgatttagtttacaattctgatcttcgtacaacctgttcctgctgcataggccatttgagactttgttcataaaaaaattttctttcaaaacttgagcatcactgaactgtttaaaagattctgctttttaatgtaaaggctttacttagaaccagaatttgatcatatttattgtatgttttttctttgtcttcaacgaaatatagtcccttttgtttttaagtggtttctttctaaatacttggatgggttttgaggtgtgtgtggcttcatctgtttttatcactctgtacatatttgtcaactggatgaatgctattatgtttttataaaatatgtgaagaattgttttggctgtcagttcaatgcgtttacttccaatttaacttattttttttttttataacattcagaagcaaattgaatttgtgggaagactcctaatgaattagttttcctttttgaagtaagatttacttctgtaggggcttccctgtgtgactcagatggtaaagaatctgcctgcaatgcaggagacccgggttcaatccctgggttgggatgctcccctggagaagggaatggctacccactccagtattcttgtctggggaattccaaggatagaggatcctggcaggctacagttcatagggtcacaaagagttggacacaactgagcaactaacaccctttccccccaaatcatttgttcttttctgcttcttctgaggatcagttttagaac

SEQ ID NO: 64577 - DNA, 842 bp, Bovine  19866881748261
  misc_feature (1)..(1): n is a, c, g, or t
nacagatgggaagacgctctatggtaatggtaactcagggtcaatgatggcacctgcctctgtcctcatagagtgggaatggggatttcatttattggctggcattaatgaccatgaaaagagttgagaagtggattctgacatgaacagactacaaattcaaggctggagctttgtttttggcaagaggaacagatttggaagaacccacaggcctaacagagctaatagagaaagcatgctgttgatccaatgattctccggcaggaaccaaatctgccttggccagtggcacattgaaggagccaacacaccattaggcagaggctcaagtaagcaggtggtttctgtcaatggatggcctacaagtggacaaaacagagtgcggggggaggaaaagaagatgataggggcacaaaaggtagaggtttaaggcagtctctatggatgtcttacggcaaaaggaggcagaaattgggagttcggcaattctcccatcctaagacaactgaatggaggcagtattccaactgagaggaaaagaagttctaagctcaatcaccaagactaagcaaaatctacttacagaatgcaataaagggccatagcaaaacaccagcaattcttaaagaccacttactcgggattcttcaaatccctgctgaagagtagtacctggtcttttgtgggtgagtggttaagaaggttgctggaatttagccccgtgaattctaggggattctgtaacagaaaagcagacagaaggtgtaggtgaaaggactgtgcgggattgggaaagaatgggtcctgatgaacctcattgccatcatttaaaattagga

SEQ ID NO: 64578 - DNA, 2514 bp, Bovine  19866880173264
  misc_feature (1)..(1): n is a, c, g, or t
ngaccaaccaatgtttgttttttatttttttcccccctgcttctttaagatcaacagaccacacagtagagttgcatgtaaaagcagaaatttagatgttgtatcagccatgcaaatgttcatgggatattaagaacaatttaaagcattaaaaaaatattgaaacaattctccaaagcatcttttatacaaagaccatacatttccatttgataggcccacagtttatctaagaggaagcctctgacaaatcttattttcagaaaatatcaaacattgcattcagttttgctcattgactagtctctgacctttttatgctcttagcaaatggctagagtctccaccattttcaacatgactggttacatctgcgtctaggaaaactacaggaggcataatggcctagagcttttcaaaattttgttttcttttaagcatcagagggcttcccaagtggccctagtggtaaagaacccacttgccagtgcaggagacatgaaatgcgggttcaatccctgggttgggaagatgccctggaggaggacatggcaacccactccagtattcttgcctggagaatcccatggacagaggagcctggcaggctacagtccataggatcgcaaggagtcagacacaactgaatcgacttagcacacgtgtaagaatcagaagtgtttattcaaataaaatcttttctgaagcccattatttagagagaataaagaagctaggttgctctggttggagtaattgagggaggagcccctgagtcccttaactcctgacaattctctacacactcctcccctcaactcttaagtgtaactttgaggctcctccacattgtagaaactcaagaagggcttgtagttctcctgctaacactctattgcactgtggtcttgggtaagtcatttctcacctttatcaagtaaagaggttggcatagatatgttctaatttcctttaatcccatgattttagagtaagaatattactgtatttttaagaatattgttaaagcattcttcaatctcttttctgaagataacctaaggcatcatgatacaaactcaatattaacatgaattttttaactaaataaaggcaatgctatgaataattgccagatgaatgactaaccatctccttctatttatatctccaactacaatttcatttggagtctcatcaacaaacattctttgcataaatcgtgtctgcggttggtgacaagggctcttccttccaataaactcagaatgaatactgactgtacttaaataaagttactgctgttgatgtcatcctgattacactttaacgtgtatgttcatgtttcactcagggctgatttcaggcttgattccaatgtacattggtgaaattgctccaaccacactcaggggcgctatcggtgctcttcatcagctggccattgtcacgggcattcttattagtcaggtaaaaactcccatcccctccctcacccatcctctactttacccagcttctctccccctgactggccactcttactgtaaaacaacacagaggaaaagacagttccacaagtggtcttggaggtggcagtacagagacataggctttttagtagctcaaagttaaaatattactaatccacgcctcacttttcccctggaagctgtggtggagttggcactgaaggtgacctggtaagccaagtcttaactactggagctattccagaattacattattccatttagatttcaagggaaaaaaatttcaaaattttggctgcctgggtttccttttttctgagcatctttcctgctcagatttaaaatgcaaaggattgcagtagcagttcttgttcagttaccttattctttccttctctcctgtgttctcagagggagtcctcagaacctcaaacttatgactatccagaggataaactactttgcaatagggatcacaaaactagttctctcagagtaattgctttatttatgtaatccattctatttaagttctgggtaatcgtccaaagttatgcattatttttgctgttgttttagatatcaaatgtgtgcttaaaagtttggttgatttctatcctaaatgtcccataggagttaatgaaaacaaatctagctgaactctttgtaaaacagagtccctaattcatttaaggagagacatactagtaataatttccatcttaagcatacttgtgcatacttgaatcaaagtcaggagttactatcaaatagccaatgtgcttttccaacaaattgtttcagaaggcagctccaaagtgatatgtagttgatatgcttcctccctgccttttcagatcgttggccttgactttatcctgggcaatcacgagctatggcacatcctgcttggcctgtctgctgtgccagccattctccaatgtctgctgctcttcttctgtccagaaagccccagatacctttacatcaagctggatgaggaagccaaggcaaagaaaag

SEQ ID NO: 64579 - DNA, 2321 bp, Bovine  19866880356277
  misc_feature (1)..(1): n is a, c, g, or t
ntggtgggtgtagagatctgaagagaagctggaaaataaacaatatccttacagtatcagagcagattttatggggtaacagatgctgtttggtgctgtcgttcatcaaactcccctcacatgtttcatgagtacactcctttttaggatcagctgaaatagcaaatggcctctgttgagactataaaaaggaacattaggggtacgtgttttattcttcattgtgttcataagaggacagtctcttgctagtcaaagagaaagagagactggaaatgaaggttatgactatttgtacagatcctaaaatatggaatgctatgaaaagccttaggaaggggtcagtctgtaaataagacagaaccgtactaagatcattcatctctggagggcaaagaagctagcgcattctgagtggagttgccagttgcagaagctctgaatgagccatttttgtccagcagcttgtcaggttcacgctgagctggtgttgtgagcaggactgagcacacctggtgtggactgtgaccagggagcgaaaggaatgtgaggctggattgccagcctgaactttaccagtcctcctctccaagcgataataagcctccagttatcagggcttcttgctcctttgaaccctgccttctaggctgtgttcatgagataagtcgtttagaattttagtttctgtacatcaagcatcatttcaactttaagtctttttccctctatcaacccaaaagaaagagaattgtctttctgtagtcaaataaaaagcagtcctttgttccctctgaaatactaattcaatgacattaaggctccaaaataactgataaattgtcatgcatgcatgctcagttgcttcagttgtgtccagctctttgcgaccccatgaactagagcctgccagtctcctctgtccatgggattctccaggcaagaatactggaatgggttgccatgccctccaacaggggatcttcccgaccgagggatcaaacccaagtcccctgcattgcaggtgcattctttacctgctgagccaccagggaagcccaataaatggtcagtggcttgcaaaacatgtgcttttcccttggaacttcttaaacattgtattttgtccaaagaaaggagatcttgtgaatacagctaacatttttctgcttacagagaaggtagggaggaaatgaacttagcggtaataattatttacctgcaatgaaaatcaaaagcattgcgggagaggggggatggagaatccctatctctgccatgtagaacaatcctgcttctttctattacatatctctaagtgaccagcacttaaagatgtgacacagactctgcagctctagattgaattgcattttgaaacgtttcgggatttggtgtatttattgtgctagagatggctttagttcacctctgttgtataataaaacatgccaagatgtggtggcttgaaacagtaactatttatgatttctcaccattctatggcttgacttcaacattgtcctgctggtctcacctgagctggcttacgcagctgcactgcagtgatgggtcagctgtaccttcttggggtttttcatccccagcttcttgactgtttggggattgcaggacagcctctcaagagggaaaagcccagtgcacaattggaggagaattgctttacaatgttgtgttagtttctgctgtgcaacagtatgaatcggctatatgtgtacatatgtcacctccctccctcccctgtccgtcatcacagaccacggagcagcttctcgctggctatgtgttttacacatggtagtgtctatattttagtgctactccttatttcagcctacccttccttcttccctcccccatgtccacatgacatgtccatcctctacatctgcatctctattcctaccctgaaatagtttcacctgcaccatttctctagattgcatacatacatgttaatatacaatattttttttctctttttgacttagttcactttgtataacagactctaggtccatccacatcggtacagatgatccaattttgttcctgtttatagctgagtcatattcccttgtatatatgtaccatatcttctttacctgttcatctgttgatggacatttaggttgcttccatgtcccggctgttgcaaatacagcacttttgaagcttttgtttccatcatctttgctaatgatgtgattcaccagtggtgaggggtggggggattactgtgataagacagagattgtcctattttctattggttctaataaagtccttatagatttttt

SEQ ID NO: 64580 - DNA, 1358 bp, Bovine  19866880375476
  misc_feature (1)..(1): n is a, c, g, or t
nctacagactctactgcttgcccattctgtagttatctgtttattgtctatttatttccacgccccacccctgcacctgctgacactaaaatgcaaactcagcataagcacagacttgcccattttgttcaaaggtatccccagagcagttcctggcaatgtcacagaagctccataaatatttgttgaatgaaaattagagatgtagatatctgtggagctttactgatgcctctaggattcactctactggttaaagcacttaagttggggactgaggtattagggctctgatgggtggtcttcagctaaaataaaaaaacatcagagctaagtaagccaggcacatcatgatttatagaccaccagatgcttcctggcagatccatttccttcctattatcataagcaatggagaacacctattgcttggagtgtgaatgaccaaaggctgttctttcagacgctgtgagcctttggatgggtaggagttcttaggaaacactagttagatgcatttaaggcaaagcaactgggagccctgttctctgggccccaccccttaatattcatttccagataagtgaatgtctcagtttgactggtagcaaagcacttttaagtttctgcagtaacatgaacagaaaagtatctgctcaaaaagagctttgagatcccagaatagagaacagatgaccccaaagcagacaaaatagagaacagataaccaagatcagacaaagggggatacagatgtgggagagtcaattaattgaagtggaaaatcccacttggggtttggtttcaactgcaaaacaccttgcttgttccattcgctgtaattctccatcccacccccacaagtgctgcagagaacttgcattttatccaaagtaaatattccaatagatgaaatccaagaagaccacatgagcactacagagctgagttctaatgggtttctcccatgccgggatctgacattttgtgatggaggaggagagttgagaaggtggaactgtatttttgaaataagcagtattctgtctctctaaattgatttttaatgtatctacacctccaacccagttgtgttaggctgaaaaataaaaattttcttttcaaatagtctccccctccaccacctgatataggaattgaggcctttttctagctggttgtatcctttttctactctatttgcacaattggatatgcaccttacccctgtcaataacctgcaagattttcatgttttttccttaaacttgatggacacctgagggagattgggtgactctgatgctctccctctcaagaaagtcatgtctaagccagaggggtcacccaaatcaaag

SEQ ID NO: 64581 - DNA, 857 bp, Bovine  19866880434940
  misc_feature (1)..(1): n is a, c, g, or t
nctgagtattattttatttgcctaatgtctttagaaactgctgtgttttttttaaactatagcaattcagtaaaataggagcttctatataagaaaataggctgaagagcccatgctttttcttgcagtctggttttatctgatacctgctgggcacagtatgccactgcctgaaagtagcccctaccctaaggaggagccagaatctcaccctttcccctagagcccttcctttcttgttttcagaaaatctgtcaaaacacttcaagcaaaaggcaaggtttcattttcctgataagtacgtggggcaataatgaaagcttgctcatttaataataagcattcaaaagacttggaattaataaagctgttcaaaattcctaggctgtttaaattgttatttttttaacttgaatttcatttcagttagatgggatttgccgagtgttttatagtcctatgtatttattgctttgacagaactactcactgacggacgttctctgtgggcaggagcccatttgtagttgaataaagactggcacagctgcccacaggaatactacacagctatctgaacaatgagatagtgtatatgttgaagttgggcagattccaagatacagtgtgaggtacacaaagcagcttacagtacgcatagtagagtctggttcgcccctacctgatggatggatggatgtggatggagaaattaaacttctttttttaaactttttatattgaagtataactgattgacagtgctgtgatagtttcaggtgggcggcaaagggactcagccatacatacacatgtatccgttctctcccaagactcccctcctgtccagcatgcca

SEQ ID NO: 64582 - DNA, 1466 bp, Bovine  19866880440378
  misc_feature (1)..(1): n is a, c, g, or t
nctctcgctctctctctctctctctctctctctctctctctcacacacacacactcactctaagtttgatttctccctacaaatgtccatgagtctgtgggccttgtaatgacctgtgtttgtgattttcatgtccacagcttatgcttgcaaatgactgcattttatgtgtctgtgtgtacctggcacactgtgtgctttgtacatttttagggaatgaattttagatgagaccttacattcaggcacagtgctgactcttttaagtaggactcaagcatgttagtctaggcaggactcagccatgttggtcttttgggggccaccattagggacttacctcatggatgatggaagaagcctttgattttaagataaaagaacaattggtagttatcaactggcagctgaaacctacctctaaaaagtatgcctggtggccaagaagctgactctcacaggaatccagccatgaccaccaaagatgtaataagtctctaacactaagtccttgattaaagagactgaaagaattcttgtgcctgacagcttgcttctctcacatgctaggaaaacccaaggactcaaaaatggaaaagaataacccagtggattactgtataggaagagcagaaaggggacttccctggtggtccagtggctaagactctgtgctcccaatgcaggggaccccgggttcgatccctggtcagggaactagatcccacatgctgcaactaagagtttgcatgccaaaactaaaatcccacccctgcatgccacaactgaagatcgtgtgtcctgcaactacgacctggtgcagccaacaaacaaaaagtagacgggaaacaaaccacctgcctaaccacatggccaaagaccaagaatctgcagaaacggaggccaagcctgaaaagtggtggccacaactgaagagcactcacttctagtgctttttagccaggcactctttatcatatggtagaatcactgttctgaactctgttgttgcctattcattgccctcaccctttacctcacgctctttgagagatctggtcaagatcaagtgcactcctgatgagccttgcacattttcttatcctccttaactacagccccaaaagtgttcatctgtggggcagggttgattgtcttgaaccatggaagaacacgaaaacctagggaaatgtcatgccctcccaccttctcctcctccctaaaacacataaacattttactgggaacaataatttccaggaggggaaggatgtgctgatttgtcagggatggggtaaagagggtaactagagtacagaggctcccagaattaatagcatttttctcctatgagttctgtggagctaaattgacatgcacttcagaaaacaagagagttgcactcggctcacaatggcggctgcaccatctggttcccaatgagttgtttttagctaaatgttccg

SEQ ID NO: 64583 - DNA, 3547 bp, Bovine  19866880498400
  misc_feature (1)..(1): n is a, c, g, or t
ngtagctgacaaaattttctagtgacaatagtctcatgtatttatatttaatttgctattaaaatgaagtaaatatttttgaaaggagaaaaacagataaatgaaaggtgggggcagtgtctagacttgtacaggtattgggtagcttttcagctggtacctgagactcccagtgtgagtcactgaactgctattaaggtcactatatcagtccaaagggggcttccctgggggctcagcagtaaagaacccacctgccaatgcaggagatataagagtgatataaggaaatataagatttaatccttgggtcaggaagatcctctggagaaggaaatggcaacccactccagtattgttgcctgggaaatctcatggacagagaagtctggcaggctacagtctgtggggtcacaaagagtcggacatgacttagtgactaaacaacaacaatctgtccaagaagtcaaggtagtcacagccccaatgaccagggttacttcctcttccctgcacctgggggccataggttttcctttgggagggggtcaagaggtgccccaaggagagagagagagagattttgaggaattgtctcgtgtggttgtggatgcttggtgagtccagaatatgatgggggaggccggcaagctgggaagtcaggaaggagttagagtccaaagcctgagaaatccctcttgctcaggagatgtcaggtttttgttctatcagactttcaacggattggatgagacccatccacattctggaaggcaacccactttatttagtgtctactgattttaatacaaatctcatccaaacccatcacagaaatatccagattaatgtttaatcaaacgtctgggcactgtggcctgccaagttgagacatcacattaatcatcatagcatgtaaactttgaggaccttaagaagattgtcctgtgctgagactaagagggaaggacatggggcaggttgcttgtgccagttctatctatggcagccagtaaattagcctatatcctttattccttttctttcttttaaacttgcccattactgagtcaattcaatgactaatctttaggtgggttaggaggaactggtgcttgcctggtggctcagatggtaaagaatcaatgcaggaggcctgggttcgatccctgagtcgggaagatcccctggagaaggaaatggcaacccactctagtattcatgcctggagaagcccatggacagaagaatctggtgggctacagtccatagggtccttgagtcagacacagctaacacacacacaaaaggataagtagattctcctggctagctccatgatcatctagcaacactcagacactctcagatgataaacccaaatgcgcacagaggcctggggacctcttgaccccttcccaaaggcaaacctgtggcccccaggtgcagggaagaggaagtatccatggtcactggggctgtgactctctcgacttcttggccagattactgttggtctttaattgcaaagtcatgtccgactctttcaaagtgagtgcccctgctttttcttcctaagcacctgtttagtttctttcatggaaagtaaaccccacatgagcagataatgttttgttcgttgttgtgactagtgcctacaaagatgttcagtaaatactgcatttattgaatgttaaatcgataaatgtccccatgccagcctcagactattgcaagaaagtaactctttttgaacttctttcatttgttaaacattgagtgcctactatgtatcaggcactctcaagccgctgcagataacaagaagggcaaggtctcctccacattcatggaacttaaatgtggtgaggaaagtggaccatgatagactgtagcctatcaccttcctctgtccatgggcttttccaggcaagagtactggagtgggttgccatttccttctccagaggatcttcccaacccagggattgaacctgagtctcctgcattgtaggcagacacttaatcatctgagccacccaggggaagtccaagtaataaaatagtaacaagtaataagtttaaataacaaaataatttcaatatttgatattttaataattagatattttgactagacatttcaatttattaaatgtttaatttttaataaataatggcaaatcagatttcaagcatagatccatgaagaaaataaagcaaagtaacaggcctgagagtgagtggggggtaggttgtgcccaccttaagaagcctgcttggcgagcctcggtgagccctcaagggaatgtaaaggagccaagacaagcctggggtggagtgctgtatgcagagccacatcaagtgcagaggtgctgagactggaacatgttaatcaagtctgaggacagggtggctaagcccagagaaggagagcgtaaaaggctaggtcagtgtcagggaaggctatatcaactcagcctctcaggctgtgctgaccaacgtgggtttccttctaagggtgacagggaagtctttggagacttttaagcaaggggtattactttctggtgcatgaggcataagagctgtgggtttgatcctggatcaggaagagatccctggagaagggcatggcgactcactccagaaatcttgcctggagaatcccatggacagaggagtccacggggccacaaagagtcagacaccactgaagcgatttagcatgcatgcattactgtctggtttactttttaaatcaccattggcttctctgtcaaaaagaggctgtaggatgagactgggggcagggaaggcaggctgggcagtcacattcaggagagatactggtgggatggatcagagtgggatctgtggagagggtgagaagaggcaggctacaataaggacaaacttgactcaaaaatattaaaatacactggccttcttcagaatctaggacttcccaatattcttcccgcactcctgggttggcccagtttgaactcacttttttggttccccagagatgcctttgcacttctccatacctgatcctatcagagagggaggcagcatgctaaaggagtgagttgtcttttttccatttatagaaataaactctcatttcactcaaagtaaagatattatggggtttcccaggtggctcagcctgtaaagaacccgcctgccaatgcaaaagaagcagaagtgagttcgatccctgggtggggaagatcctctggagaagggaatggctacccactccagtattcttgcctgaagaatccccatggacagaggagcctgacaagctacagtccatggggtcacaaagagtcagacgtgactgagcaactgggcaggcaaagataatacagaataaaggaggagaagctcttttccacccttggaaaactctctccagttagagccactagtgctctatgagccactatgaagattaaattattcaagaagtaatcagaatatgacttgaagtgtttaaaaagtgaatcctaaaaaacaaacaaataaacaaagc

SEQ ID NO: 64584 - DNA, 2093 bp, Bovine  19866880529171
  misc_feature (1)..(1): n is a, c, g, or t
ntggctttgatccctaggttgagaagatcccctggaggagggcatggcaacccactccagtattcttgcctggagaatccctatggacagaggagcctggtgggctacagtccatggggttgcaaagagtccgacatgactgagtggctaagcacagcaaagcacataagcaggcaaaaaataaaaaaacttttttttttttttttgagttctctgatacttgaagatgataaggtagctttgttaagatgaactgaaccaatgaccattaatatatccacattaaacactgccataaaacacaacaaagatacaaaagaaggttctgggacttctctggtgggccagtagttaagactccacgctctcaatgcagtggcagggtttgatcctgcatgctgtagaatgtagccagaagcaagccaaacaaatgaaggtctttagggaagaggcaaacagttacgatttccaaattatggaccaaggacttcagcagggctgggggtccagtagagggtccagcacccaagtgtatactgagcattgtttgcagactaaatgactcacatgcacaaggaattttttcaaatgatgtggctgataaaatgcagttatatttagaagcgttagtggactttttgtgctttttagcttcttaggtgattatgacgggaagtcatcatatttaaaatgattgggaaactcaggcttataaggtgactgggatccagttagctgatggagtggcttctgtcttacagcatgtccactctgtactggtactttggcctgtagaagtgctttgaattctgcccaagattaaccaattacctggataaagccagcaacagaaatctaaatatggacaccaggcgggccatctgctttgagcctgatgctggatgatgctcctccctctttcttccccttctatatttatcccatcaatttttgagatgggcagtacattcctatactaagaaaaaaaaaatgatctggactttcataagttctctagagtagttactgggcttccctggtggctcagtggtgaagaatttgcctgccaagcagaagatgcaggttcgatcctggggtcaggaagatcccttggaggaaggcatgacaacccactccagtattcttgcctgggaaatcctatggacagaggagcttggcaggttagagtccacggggtcacaaagagtcagacaggacctcgtgactaaaccacaacaatggacaattcttaccacattcaaaaaatttccactaagcagggaaatttcaaaaacaaaactaaagcgttccctatgctaccccaaatcttgtggggaccaacaaaaaggctgccaattactaactttaccaaactagaacatgcaatgaaatgaattatacatattatcatcagactctcaaatacatcttcttcattatatgagagcatgccacctgcaaaaagactgtctttagatgagctttatggaaaagtcactctgttagcttttgtcttggaccggtgataactttggcctgtcagattgatgggcctccaattattaatggctgtcctagtgaggaggaaggatgagaagaggggaaagcatcagattatcctgaaggctatactatttctttctgctccagtgatgcctcctagccctaaattcctcaatcttaactggcatctcttttgcaaaaggagtttagtaatacaggataacctgagatcctgcagcatgggcacagggctagaacattctgtcagaccataatgccgctggtccgtgtcgtcctgacgtcatctggtagagtaactttgaactttggaatctaagatgactattttttggctggaggtgacccttttaaaattgttgttgtcatggaacatgaacttagttgcttacagaaatataaaagcacatattcaagcggatgctattcaattttaaagaaaaccaacactctaaaatattgtcacataaattattgagaacttattttagaatcatttatggtgtcttttacaactgcaatttgtgatgcttagatcatctgcaatgactgatgcctcaggcattacttag

SEQ ID NO: 64585 - DNA, 2223 bp, Bovine  19866880624752
  misc_feature (1)..(1): n is a, c, g, or t
natgtgcccacagtgtgagcatatgtgaaaggtgagaggaccaggaaccactgcatgaatatgagcggggtgaagcttggcgaagtctcaagggggatttaccgagagagccaagaaaagggtgggtgtcacaggaaaggaataaaggcagattgtgctggctttacagccatgcctcaggctcctctcaagaacactattctaggcagtagagcagcttcatgtaatgaatgctggttccactttataaaagaaaagtaatttcattactagagcaacagtgatttaattactatctcagagcttctacttctacactgtctactgtggtatgcctacttgctcactagtttatatttacaaggtacagctcttaggttttacagggaccccagacacagaagaataaagcctgtaagagtcagtcttgggacccttcataaatttgcaggtgtaaacctcctggtgggaaccgaaaatggcctgatgcttttggaccgaagtgggcaaggcaaagtttataatctgatcaaccggaggcgatttcagcagatggatgtgctcgagggactgaatgtcctcgtgacaatatcaggtatgttgtgagatgaccaggtctgcacgggtgggaaaggtgatcgcctcacttctgaaggaatagtaagctctgctcgtcccaccagcaggtggcatggtgaattatgacagcgcagcgagtgacatcacccatattttctaactctggagattctgaccttccaagggaagtctctcacctctgcccaaaatctgaatcagacagagacgtgatagctctgtgcttatggggctttacctctactgggactcagcaaggatctttttaaggtgtctgcactccagtcaccactgtctgttctcagaaggagaatataaaaatgtaggcttctgggagtgagaaattttgtaagcagaaatttctctggtctcttttcttgtaagaactgctttagcttatagttcatggatgctttagtgagtgctgctggcccataggtgattgcgtctgcgaggagatttgaatataggaatcattattgctacactctgcagctttctggttcacaaaaagagccttaaaaaagatggagacagggacttccctggtgctccaaggttaagaattcatcttgcaaaaaaaaaaaaagaattcatcctgcattaatgtagaacagtccgtaaaaatactgaatctctatgctgtgcacctgaagccaatataagattgtaaatcaactatattttaatacaaataatacaattaatcaatgtggaaaaacaaatagaaaaaagaattcatcttgcattgcaggaaatttaggtttcaatccctggtcagggaactaagatcccatatgctgtggagcaactaagcccacgcactacaactactgagcccatgtgctgcaagtactgagcccacgtgctgcaagtactgagcccacatgccgcaactagagagtccgtgccccacaaccaaagatcccgcatgatgtgactaaaacccgacgcggcaagtaaataaataaaaaatatggagacaatagtgaaggccttactactcacaggttaaaaatgtaacctgaaagactctgtctgttgaaagttttcccttacagatggtgtttgaaggaatttgataaataatgcccctcttgccccctcccatcccttccggtatgaagccaactgtacccctgcacgttagaaccccctgaagagatctaggatgcccccagactagtgggtcagagtctgggatgtggcccgggtcacagaggctttggtggctactgatgtgtctccactgtgcagccaagctggagaaccagcttctgtttctcagagagacacattgggttcctcctgggttgagtctcaaatagggtttagctcttaagctgtgcttctgttttgagaagatgccttcacgagatgccacggttctctctgtcttttacctttcaactgaatgcttagtttcgtctctttttatcctccccaagcaaaggttaaccaagtaaattcttcctatattatcatttaattcaatatagtcctttatttgggctttgctagtggctcagatggtaaagaggagaaggcaatggcaacccactccagtactcttgcctggaaaatctcatgggcagaggagcctggtaggctgcagtccatgggggt

SEQ ID NO: 64586 - DNA, 3566 bp, Bovine  19866880650444
  misc_feature (1)..(1): n is a, c, g, or t
nttccaaggacatggcattcagactagtgtatctttaaaaaaaatctatagtatgtgttttaatgcccagttgctgtgtatttgacttcgaatgctaactgaactgcttctgttagttgtcttgataggcttcattctagtatctacattgagatacagacagaaattcatttttatgtgagcatttaaaggttgctctatttttgacaggtaatgtccagcatgtagcaataaaaatgcaagagccaggtttttattgtcctctgaaaggtcaagagaattataatgtgatgacagactcttccattgatgtataatggagtcagggatctttaacatggcccaaagaagaaaacattggacatcaaattttggggcatgtctgtttttattaaatgggctatgttcataagagaggcagccctcaacttagaaatgactcttttctaaaattcagattgactgtaggtaacatttccccagaaaatcagtgctacaaatcagggatcagtgaaatatttctgtaaagggccagataataaatagtttaggttttgtgagctctgtagtctttgttgcaactacttacctctgctattgtagtggaaagcagctctagataatatgtaaataaatgagtgtgtgactgtgttccgataaaactttatttataaaaacaggcgaagaaccagatttagtttgtcaatgcttgttacaaatgaccattcatttcccagaccagatcacagaaaattatttatattgttgtctttactttgtatgtatacaacaatactactttaaaattatttttttaatttaatgctagtatactcacaacaaaagttcaggacaagatggcttcactcgtgaatgctatgaaacatttaaagatgaattaataccagtccttctcaaactcttcccaaaaattacagaagagggaaaactttcaaactcattttccaaggcattaccctgaaaccaaaaccagacaaggacagcacaagaaaagaaaattacaaggcagtattcccaatgaacagagatgcagaaatcctcaacaaaatattagcaaactaaatttagcaatatcatacaccatggtcaacagggatttattccagagatgcaaggatggttcaacatctgcaaattaattaatgtactacatcacattaacaaaatgaaggatagaaatcatatgattatctcaatagatacagaaaaaactttcaacaaaattcaacatttatctgtgattaaaaaaactcaataaagtggatatagagggagcatatcttaacatcctaaagaccatatgacaagcccatagttaacatcatactcaatggtaaaaagctaaaagctagccctctaagatcaggaacaaaacaaagataccctaccttgtcactaagttttcaacatagtattagaaggtttagccagaaaagtaaataaaagactttcaagttggaaggaaaggaaactgccactatttgtggatgacattgattttatacatagaaagccctaaagacctcactaaaaactgttaaaactaataaatgaattcggtaatgtcataggacacaaaatcagtatatggaaatctgtcatgtttctacacactaataatgaactatcagaatgagaaattaagaaaacaacccaatttataatttatcaaaaggaataaaataccttggaataaattcaatcaagaaggtgaaagacttgtacactgaaaactataagataccaatgagaaaaattgaagaatacacaaataaaggaaaagatattctgtataagattagttgggtcatttccatggatttcctcattttggactcctctgccatgtttcattgtcactcttctgtcttctttctgacttgtagctttgcttgaatctcttactttcacagggccctttacattttaaaaaatgatgtgaatgtatgccatttttaatcttttaactctcattgtagtcatattgattgagagagagacaaccaacttgtgtggtcaaccagaagtcacaatactgttttctacacctgaagtttgaattgctttagacaatattttattctattgtctgtttgttatccgtatatggatatccatatctgtatatggcctaccaacttggctttcgtctgtgtgagaattaatcgaaactcaggattttaggaccatatttctatcctgcattgtaacattacctcttctacttctctcttcttaatccctcctcttatcttgtgtgatgcttggcagaaactcaggagactggagggagtagctctttattcttagtcagccaaaagctgtcagttgcttcttaggtgattctactccttccttgactcctatccctacaagcagcctaagagagagaatggatttatccataactttgacaataaattgtcttttgatacattagaggagcccacagttgattgtgtcttgcgttttggttctaaaatttccaaacatcccagattctctctaactctggagaattatagggaattggaatgaggatgtacatgtgtcttctgtgcttttccctttgctgagactctccctgcatgtttgctggccagtctccctctgagatctagggctctgggctacttatttcaccttgaaccagagcgaggcattgctggttatggagactgctaactcattcctctctcccattttctctctggccattatgaatgtacatgtctatgttctgcaagaagacagagagaaattgagggtctggggtgtctgagctcagctccttagtaagatttatgtcttattgatgttccagccttcttcatgaaagtttaaagtaaattaagctgttaattcacagattttcttactctaattttcctcctgagaaaacaaaacagcacagatagtttctgtggttcattgtcagttgtcagaaagtctctgtcattcctatgccaattttttagactctagtcacatttttttattacattaaatcgcattaaatagcaagtttttatttttaagtaacatatccaagtggtaagtttttaactcctagggtaaaaagttatttaaaagctatagacttctttttctttagctgaaggtaattttctaagcctttttataaactcagaaattgtgagacccaaggttcccataaggcttcccagatatagtcctggtagtggcctgtcacatggaattcgaggctccgtctaattccacttgaactcattactccctgtgtgaatgagggctggtcacttctctacatccacatcccttatttggataaagtgtccatgagagcactgcatatcatccccttctaaatgcttgtggattttccaggaagcttatccaaactggtcttcagaaacctggaatatatttgctgttatgagaaaacatctacatgatgacccatgtccagactgggatggtctttccagtccatccctctggacagaacacttctctctgaaatgagagaatctctttgagcactgagtaggctactatgtata

SEQ ID NO: 64587 - DNA, 2456 bp, Bovine  19866880653169
  misc_feature (1)..(1): n is a, c, g, or t
ngcacaagcacaataaatatgtttttatttgaaaaatgtttaatccataaagaggagaaaaaaatttttttaaagaaaagcttttaatgaaagatgctgatacttgctactggtttagaaatataccaatctccaaaagcttctgggctgaagtcacctggagcaaaggtcaacccaggccatcaggggatcggatataggccatgagaggtcaatataaggccatactagtacattaaaaggaaaaagaactctcaaaattcccttatctttttctcaggatccctattacatacaatcattgggatcaaatgctggtggaatcaagtttcccataaaattctatgtaatcatggaatagcatatttgcgtaatgctttacagttttcaaagcactgccataaatactttattgatgaaaccggtgtatgaggaaggcaagcagttgtgatcattctcatttttagttaattatggataaaggactcatctaacatcacagaattcagtaagacatgggcatagaacccagcgctcagtccacttcactcactcactcattcatgcatttattcaactaattgggactatggattttgaaacaaacaaaacctagcctctggccccacggagtgtacagtttagtgaccaggtagaaagaaaaccctatatggtttataacacaagtgcaaaaagtatagcaggaagaatgcatgcaagtcttccagatgaggacaattcttaaatctaggtttcgatggagaaagaaatagctaggcctagaagggaatgaggggtaaagggagaaagacaagcaaaggtcatccaattctgttcaaagagaaaagtgagtgcaagtcctggcagaaacttaagagtatgaagtcagcaaagaccaatcttggccttgactgccttactctgtgggccaagctaaggacggccaacgtgctcagattcagatatatgctaatctccaaaaagctttctgggctgacctcacctcctatgtaataaagcatactggttcacatttcatttcttttaatactgtcatatcttggaagaatgactcaagccttgcatttgaatgattgttttttgttgcctatgtatgtatacacacatttcatacacccacatggatcatttatatctgtaatactatacagaatataagtatccacatacattatacaaaacatacataaaaccctataaaccttgcacacagagacatttgaataatgtgtatttctagactgaccccaagagatacgtttagatggaaaagggttacggagacaaccatctgtcctagatgattcagtcatttgcctgctgaggagaaactgaagggaggttgggcaagatgaattccaaagataccttagggctccatggtttaatgttttatgaacttatctgcatgaagcagtttctctaattttgataaataaaatcccatgaccctggtgaaataatctctctctgcctctcagcagaaagtgtagccacaaacagtgtgacctatagaaaagagcattgaatgagaagtcagggaacctaaatcctccccaaaccatccttctccacccccactcactacacctccaaacaggaagggggctgtatgaccttgggcagtggacttcacctctgaaggcttcagcttccagagcattaaatgaaaggtgtggttaggtgttccacagttctcttccagctctaaatctgtgaagccattcccttccctcaagacttagcttatctttagagctctaaaaatcaggactaataaaactggattcagatcacctcttttctaaccatcctctcttttctgacttcttaaaccatccaaatcttgcataatttaagtcatcaaggctgtcgcttggtgctctggtctaaatttgcattgttgctatttggggaaaatttagactgggtccaatctgggatcactgactgagaacaataaaggcttctccagacaggatctgcttttaatgcattgagcgcagagtttacaaaaagggcactgattgtgtacattaaagagccaccaaaacagcaagagactggtgaggctgcagcaaattctcctagatgccactgaccttggctgcatttcaggggtcaggcattccccaggaagttctcagcaggcaggccttcctgaggatttaggaacaaatgagacctctcatctatacatgagcccatctctccttatctaggaagacagaaaaagatggtctggcctctgatttgagattacctctgtagcctctggactcaactctggatctgcccagctcacctaccaccagacctccagaatgcaattgtccccacatctacatttaaatcctccagccagcagttccccatcttctgaacgagctgggaagctggagccctctctctttccacacctcctgcaggcagaa

SEQ ID NO: 64588 - DNA, 1100 bp, Bovine  19866880657363
  misc_feature (1)..(1): n is a, c, g, or t
ncatgggattctccaggcaagtatactggagtgggttaccatgctcttcctccagggaattctcccagtggcgggattgaacctgcattttctgcattgtaggaggattctttaccaactgagctatgagggaagcccctatatacgtgtatacatggcttacttttgcaaaggatgagtagttatcattgctccccacattgatttattatttgctattgacggtgtgtgtatagttattcgaatgctatcaataaattctgaagaaaatgagtaataggaaaaagaattcagaacatttgttgatgatttgaaatccccatttgtacttgatgtgtcacaacctctttccaactgattcaagaatcgtgggccgtttttcccacttgttctctatgtcacacacatcttagtcactatgttgttatttcgatggccacatccaaaatcttgctaccctaccaagttgaaaaaattatgcagatcttacttttgtcttaatccaagagctttgggttgttcgttatattcctgtgagtcattctgaaactcaggatgctgcttgggacctgaaattgcagtgatttaatactctattgttcttgttttttccacatggagaacagattctaatgtggatctaattgagttaatataataagtgcacttttcatgtgagcaaatccctggtgggctgctgctttctctttgaacatgaatcacaggttaggaaatctataaataccaaagcaaatttgcttctgcatctaaaggaggaaagataccttgtcaaatcttattttatgttcaaaattccttttcatatttaccttctaaatctttgaggagtagtagatttttcagtactttctccaagtagaaagtaagataagtaagcaaagcggacgacaaaataatgattatatgaaccagttttgagtctcatccaaatggtgttttcaaaacatcacacaggggtttgcatttcacattgatttttatgtttttacattaatggtttgctcgctcctgagtcttgcttgttcaaattgaatagacagcagtgacaggcaggaatgactctcatcttctaaaaatag

SEQ ID NO: 64589 - DNA, 2771 bp, Bovine  19866880668908
  misc_feature (1)..(1): n is a, c, g, or t
ntgaggataggactctatttaatgagtactctgtcctagcacccagatcaatgctagatacctagaagatgttaaaagtatactttttgaatacatgaataatcatggggaagtaaacctcaaaattttatccccttgcctctaaggaataaagaaggaaacaaaatccactttcatttttgagctctttttatccttcactgaaaactacttctcattctctttgctgatacacagaaagcaactctgggctggcagttgggaacaaaggttgagtccccccaaccagactgtgtgtcctgtgacagctcctgcctgttagaaatctctgaacttgtaaatacctctgcttctcagatttcttcctgagcctccgatacagctataaacacacacttttgccttgtggctaaagtaaaagaacttaggatattttcacctaaaaatagcagcttgctcttcattaagtggcagtctactgcctgctcttacattcagtccttctcccagcaagaaatgtaacaaaggaagaggctggtggtcacaagccaggacattgcagggctcattaattacttggaaaatggtgcctgggttgcagccagaatcccaaacaaagaaaggaaatagctcctgctctccaattgacaagttgatgagtgaggtaagaatgaaaatcatttgggtaagttaaaaagggaagaaatcaaatggaagcagtagtttagttcaagaacaaggatgcaattaagacatattcccaaccccgagggggttgattcatatcagttgagaccatggaaatcattatctgctcctgtccatgagacaaattcattatctctaataaagggatagggaacaccaatttaggaaaagtgttgatggtgttggagttgagacctaagtacatgatatgtgtacaaatgagttattaatctcagtagcttctatattggttggatctgtatgacaactatgttgtaaattatacagaattaaatatttttactaaaatagtgtccataattttagcaaggccaagaatcttaaaccatcttagcaaatttgtttaatcaaatggggatagtttcaagtaggaatcagttaagaaaaatgagaatttcttaatgttgatgtcaaaagagatgattttaaaaaacacagtgaattaaataatagaattttggtgtgattatattttaaggcagtgttcacaaaacttagcctttggcttttataattctgagctgggcaaaatacaaggaagtctgatcatctaatacatccctaaaatgagtgagtgagcgagtgaagtcactcagtcgtttttgactctttgcaatcccgtggactgtagcctacaaggctcctctgtccatggaattttccaggcaagagtactggagtgggttgctgtttccttctccaggggttcttcccaacccagggatcgaacccaagtctcccacattgcaggcagacgctttaccatctgagccaccagagaagtccctgaaatgcggccgtaaataattcctttcttagatgtgatttacacggttttcagtactgaatggccataatatgttccctccataaaactactgctttataaaaaaaggaaaatgaaaacacaaagacaccaccactaccatcaccaccaccattatcaccacaaaacccctactttgaagtgagacattttttggctgtttcataacctgtaaggaatataaagaaaatgcaagaaatctttaaaatatactgatgtggaggaacccttcttagagatggggtaccagggcttgccgggcactgtctattttataaatctctagaaacagctctgttgacttcaggaattcctccattagggtcaaatgagacagtggattcaacagtacttgatgaaccagaatgaatatctgggatatttttggtgttaggtctctcctctattagactggaagcaccttaaggataaagactttctttgggttatagctatcaccagtgcctggtccatacatggatgaactcgttgaatgtctgtggaatgatcaccttgttttccaggcttttgtttccacataataccttaggatacctacctcatctgcacatccacttgtactgttttattaatttttttaagaattgaaggagaatttacataggatgaaatacactgttcttcagtatacactttaatgaggtttgacagattcatctacagtattataatagtaatatagtattactaattttctttatgctgacaattttactcaatttacaactatattaatagccatgaacttgtggttttataatctttgtaatgttgactgttatctagtcaatattaaaatcaatgcctattttttagaatagaaatattggtcttaatatcaccccagatgtcactcatctaagctatattgagtaacatttcacagagaggcttgtctacctcattgtgaaactgcaggcaccagttagtgggtggggaacgtttgcgtggagtgtggggttgcggcagatttaggctcctgaaatcaccttggcatagcctgaattaccaggtaagtgagtctgttgtctcaataatgtgacaattttgatacactggactattgagatgcctcaagtacttccatctgcctcttaaatagctttcttcatccatcttttatccatccatctatccttcttcaacttttgttctgccttagaagagtaggaaaccaggcttatttcgaatttgt

SEQ ID NO: 64590 - DNA, 2592 bp, Bovine  19866880709204
  misc_feature (1)..(1): n is a, c, g, or t
ntcctcatttttgcagtttttgcatcttatcaagaaggcttggccttgtcctgtgatttaatcctgttgttacatttatatatgacacatagcatttcagtttgtacttagcattatccaaagaaataatactacatataggcctcttaaaaataacttaggcaaaagcaaatttaaaaaatacaagaaaaactcttatacccctacttagaaatatcaagtatgggtttaagtatttagacagcttaatattcccccttattcttacaattcccttgtcattatgggattgttgctgaaagtaagaaaatattatattccatttataaaattttttttattcaaaagaaaaaaattggaactatcttatatatgatagctctgtgtcctaacagtattgtcatgaatgctaactttaggtaacatttattgagtgccctctctgtaccaggcactctgcttagcactttatgtttaatcctcacagctctctgaggtaggtatattattgagtgcattttatttacaaagtgctatacactgaggtgatgaaaggcaagaaatgcaggtgatcttcctgaactcctcaatagactgagctccttgaggtgaggcattctcttactgtgtctcagagtgcatgacagtgctgatcctgtagaagggagcgtggaagaggaagtgagaggagatccctgcattggtgtcaggacagtggacaatactagatgtagcagatgaacggctggatcatgctccgagcaagttaagagaagatcacatttgtaaggatgtttgactatgaaaacgactccacagaaatgatagtgtactatgaaaattacccattcaaactcacatctaatttccctgggattaaatccaattaattagcgtcaatcttattatatattatgatgaatattgctgagaacctagcagtttttattatgttaagctagttcctttgttttagtatgaagctttaaccacttatttcatctgaatgtttcttttcaactcactagtatctttgcaaggaaaaaattatgaaagggaaacaatacatgctatttacatttctctgaggcagaaaacttcagggtctgaattttgagtatttgcggtcagtcagaaaaattaatcaaaacttaaaaggggtcttgtgggttctttatttaaactcttacttgttcagtcactaagtcatgtccaactctttgcaatcccacagactatagccaaccaggctcctctgtccatggggttctctaggcaagaatactggaggggaagctatttctttctctaggggatcttcctgactcagggattgaactagcatctcctgcactggcaggtagattctttaccactgagtcatcagggaaatcctaaacacttactgctgctgctgctgctaagtcacttcagtcgtgtccgactctgtgcgaccccatggacggcagcccaccaggctcccctgtccctgggattctccaggcaaaaacactggagtgggttgccatttccactttattctaaatgagatcaggaatagtgatttgaaatcatcacattcatcacctataaatatgttaaatttctttactggtgcaactttgggcttctcaaaggccaccagcatcctgaagaagacaggagctatgggatgagccattttcctgcttctgcccgactccaagtccctgcttttatttttttttttttaactgagttcacagtttagaaaaaaaggtctaccaaactatttaagctcacttggtatcctggaacagctaaggggacatagttgatcccaaactggctgaaaagaaacaaaaatcaaagtgagaagaaataatttcatgttgcttggaatgtcaaattacataaaggtaaacaactttggtcaaagaaaaaaaagaaaaaacaaaaacaaaaaaccctcaagtgttcagtatttttttttcccactcttaaaaagaacttttaaaaagagaaagtgcctttctcttccatacattaaagcaaatgtaaaaaggattgattcagtgctctactttgtgaggaaaagagcctggagatatttcagctccctgctaagcctttggtatccttcagaactctatttccatagttgcaaaattgactgagtgaaagtctgtttaatcatctgtgtatttccaatttgtctacataggtaaaagcacttagtgcttggcacataagtagtattcaataatgttagtaatcataatagaacagcttagatagctccatatactgccaaggcgaaaaaggaaacaccaaaaagaatgattgctttgtgtttgggaactcagtctttccaggaaaattaaataaggattttgatcaaggctgaaattcaatgtttttgaattttcagggactcaccctcaggatttccaaccctaccttttcaacctattttaaaacataatagttcagaaaatatttttttaacaaacagaacaatcttttgcttccaatttccagcgttagactgctgtatcttattttgaagtttgaggagataaacaaatgtttgatttatcactgtttgagtgt

SEQ ID NO: 64591 - DNA, 1635 bp, Bovine  19866880760289
  misc_feature (1)..(1): n is a, c, g, or t
nacctagaactcaacacaactcaacacgcatttattaagtatctatggcgtgcacagcattgtacccagaaactgcttttgagaaataggtggtgagtttggagatctcggaggaacagcttttcccagggcccctggatacctctgggttcctaccagaatcaaaacagaaaagatgaaaaaaaaaaaaaaccaaaaaacccagaactttgaggaatccgataaaaaaattaaaagtcttccttttaagacagggcctaagcagttaatggctaaactactgaatgaagaattaatgtttttttatcaggccatatcagaacggaaaagcaagctgtttctaaaatatcggggacttctagcttacccgcagctgatgattcctcatcctcttcatcttcatcagtgggggatgtctggtataccctgggatccacaaagggggtgaaggaggctttggtgctgctccccaggccatactagtcaataagcaagaagattaagaagagcagataggtaaataccacagcaaccaacaacgctaacaatactctgcttgggctttaaaattagtaagtgaaagtgaaagtcgctcagttgtgtccaactctttgtgaccccataaactgtatagtccataaaattctccaggccagaatactggagtgggtagccttcaccttctccaggagatcttctcaacctagagattgaacccaggtctcccacactgcagccagattctttaccagctgagccacaggggaagcttactagagactcttcaaactatccaactgtatacaccctaactaccaagtcaaagtgtgtgcttctctctctagcttctcctggtattggttccttactaaccactagatcttggtaggagttcgtgaattatcagactgcaagagctgcagcgagcaaatgacattatgtgccacatgtggtaccttactatctggtaagatagctgtggagacagaaagattatcactctctcgaagtaaaagcaacctcccactgactaagtagtcttaagaaaagtagacaaattggcaatgagttaagtaagcacgtggacatagcagcacttcatcctggacactcgagccactcgactccctcctggcccatttgaggcctttcatgctggcctggtgatgcaggtggactggtgttgactcaagaagccttaaaatctgcaattcagagacaatttcttccagggaataaagatttttttccttctcatgatggtttccttaaaacaactcatacttatatgctttttgctctatctagggacctcatgaagatatgaggcttgcaggcaccttgacagcctacttaaaaaataaactgaggggcctggacagcactgttcaactatgaaatcagaaccagactaggaaacactaaactttcaaggcttcatgtcatgatattctacatttgacttttgtcaaaggagtttcaataaccatctctttgttttgtctcttattggcaaatccttttaacatcaccaacagatttccctttcttgtgtgattttgggagtctaggaagatgaatactttgagaatgtatatattttttatttttcataaacaaatcacttcaatctta

SEQ ID NO: 64592 - DNA, 915 bp, Bovine  19866880885123
  misc_feature (1)..(1): n is a, c, g, or t
ncccactcccgagccctacgtcaacacacacacacacattttaatccagtaacaaagtgtataggagcagatgaggcagggttgtgagcaggaattacaaccatttcacctataaataaattagaagatgattttagtggatgaagttcctttaaactctgtagagaggccaatttactccccctctgctgagatcacagagaaactagaaattggttttagctttccctctgagagtgaagatgaacaccgattttccactcacaattaagattaaagcatagttaagatacctatctgaacatcttcaggaatgcaacccttctttgatacatgtcttgaggcaaaaaggtagataagacaagtttatgaaaagactttgtaaatccttatgatcaagcaacaagaatgttcacagaatatgcttggcacgatgtctgctccgatggtttccccaggttattggggcctctgtttatccttggtctgcacatgccattcatctgagacttaaaaattcctcctgaccacataagcagagccctcattgctcccagactgtgacaaagatgaagcaaggtagcgatacaggacagttcccaagcaacagttctctatctcaacaccactcactgtgaattcctttgcttggcacctccaagaagcagaaaatggattgttttcaagattgttcagggctgggccaactgagaattgaggcttgctcacagaaacagggcagggaagaaaagcccgtgtctcatttttctttttagaaactagcattcctgtcttcatggctgccagtttggcttagtttataaaaatcaaaatggatgattaaagggaaaaaaaaccaaatagctacaatttttagcagacaatagttaatatatgcaggttccaggcaggaag

SEQ ID NO: 64593 - DNA, 871 bp, Bovine  19866880986684
  misc_feature (1)..(1): n is a, c, g, or t
naccaaagaggaaaacatatcagtgattttgaaaatacccttgctactgctgtgtttaaaaagaaatatgtgtcttattgaggaatctgtgactggcatttttcatgaactgatggacatctattcagccagggcactgccctactcaaaacacgtttttcctctcagcattcttaaggagctctgtgcactcgcaggatgccaaagataacatctagatcagcaatttctcataaatcattggaacacggaacatgaaacaagaagaagaaatcaggaattcaataataaatatggcaaggtgcacaaacaagagaattgaaaccagatgaaaaggagccgttcagaacagaaggtcaagaaacgcgtttcccccactccctcaaaggcttggagtaatccctctggttgttcttcccatccagcttactgctctgagttggttttggaatatttatgtggtggatttaaggccttaacatacaactggaaaattagtgttgtttatcttagcgtgcttgaagccccaggctgttatgaaatgaagaagaaaagagtgtttattgtactttagggaaaactgtgcccataagccttgaaataaactctagatatgtgtgtatacacatagctcagtttatacaacagatctttttaaaactcgaagttacatacgtgataataaagtaatgtgattggttctcttttaaaacaaaatgtcaggatttctcaggagccatcttaggaagataggcttatcttaacaccattggcattactaaatatgttatgggaatatctctttgagtcttgaaacactgcagttcagttttaaaaacagattctctggggcaagtcatcatcattgtca

SEQ ID NO: 64594 - DNA, 1494 bp, Bovine  19866881036643
  misc_feature (1)..(1): n is a, c, g, or t
naacagatttgtgaaaagacatgaaaagtaataagcaaaacaattcctttactgttatattgctttatattatatcacttcattattttcttcttttatttattttgaatatttcttttattaagtgagcaggaaaatacatggttgaacaaattgaaactacaagttgtgccctttacaagactgagtgaaacaaagattcatcagaaggcatgtgtcaatttcctacaacaaaacttcatgcaacaacattcaatggagctgaatatatacagatgttacaggctgcccagggaagcctcataactactgtcacttggaagaatgataaaaccaaaatgtcattaggctgtcattaggctttcttgaagctgcatttggcaggagataccttgaatgttgtttatttcttgttttagaaaaaaaaaaaaaaaagaattgttatcatgtttaaacatttaaaccaaaaaacaaaatttagaatcctcttcccacttctagcaactttgcacttactgcaatgccagtagcttaaaatggatcattatctgtataaatgtaagaatcttgaaatactatttttctcaggattctatatggcagcctctcttccaaccctgcagggcttcaacccttgacctgttaagatgattcatggagccaaatagtacagccaggtgctttccatccacagaagcctcccaagaaagaaaatccattgagtgtttcattttctacatgaaagcagacctatgcttttataatatagaatttggacacagcttttttgttttgatattgaaattaaaatggtcttataggcttataccttaataaaagaattccaaaactctgttattatttattttcattcattttttcatccaataaatacttactgattactatttgccaggcattcttgtaagtacaggagacaggccagtgaacaaactagatgttgataagctctatgaaaggcaataaagcagagactaaatggggaattgggaattatcttatataggtctctgataggataggaatatttgtgcagagacccaaaggtgggggaaagcacattgtacagatacatgaatggagggctttctagacagaggagacagccagggcaaagatctcgagacaggctcatgctttgagtgtttcctggataaagcaaggagggcagtatggctgagcaaagtgaactagggaaaaagtagatgaagtcagagaagtggtagcggtggttgaggatggagcaaagtgtaagtcagatttatgaggtccttataggccactgtaaggacactgatattctgagtaagatgggaagaccttgagctcttgagcagaaaagtggcataacctgtatattagtggatgttttaaaagtgtcatcttggacttccctggtggtccaatggttaaggatctgcctgccaaagcagggcacacaggttccatcccggtctggaagatcccacatgt

SEQ ID NO: 64595 - DNA, 1900 bp, Bovine  19866881041449
  misc_feature (1)..(1): n is a, c, g, or t
ncaggaccaaatgcaaaagataaatctaactttccaggacagagagaccacgttagacttgggagtacaactagaagctacttcaaaaagctaaatgtaactaaatgacctttatataaaatatatttccacatctggatttatgtggcttaaatgaagatatactccaagcaacattctcttaatatctacatatacttttgtgtattcaattaagtatgcttcttaaaaaactacttgtagggcttccctggtggctcagtggtacagaataagcctgccagtgcaggagacatgatccctggtccaggaagatcccacatgccgtggagcagctaagcctatgcaccacaaccattgagcctgtgctccagagcccgggagccacgactactgagcccagaggccacaacgactgaagcccaagcacttgagagcccgtcttctgcagcaagagaagccactgcaatgagaagcctgaacaccgcaactagagagtggcccgccttgttccaactagagaaaagcccaaggagcaatgaagatccaacacagccaaaaactaaataattaatttttaaaaaagattctacatcttaaaaaaaaactatttgtaagtaaaattatgttatgactcttttaggacaacttattaaaagaaacttttaagaatctttccagaaaagaaaggctacatccacatcattgttcataaaattatacctcattttatgaaatctaggaacaacaaaagctagagttacaaaaattaaaagatttaatatttaatgtaaagaaagtatttatcatagaatttttgatatagaaatctgttcctagggctataaaatttatattcatgtgtacagtattttaaaaatatacctattccataaaggttaaatataacctataatgtgaacaatcacttcctaacttatttctcttaaggttcacatatagttgaaatccggtttggcagttttattaagctttaatccttcagagctcagagtaacagcaggattggattagtgactcaggaaacccaggtgtctctgtcctggagggggtgccacctaatgtcatctgggttgcctagaaacccaatccttaaccgggtatggaggtttaattcttcagataaatcattccaagtccccaaagcatttatagcaacactctcacttgactattgcacagaaaagcttcagtgccacaaaacacaaagggctggaacaagaaaccaagtctcctgtctgcaaatccaatgtggtcgccatggccagctttgcagtctcccctcagggtgagaggggccacacttctgaatcaaccactaagagaagggcaccctttggaacaacagtgtttgcaacttagttagtgtatttctttcctctctaaagagctgagacctcttgccacttgttttttttcctcaggtacccaaaaaattagggctaattttggattttccaaacattctcatccttaactgagaatccttatcttgttatcatcctctcttgcaggagtgtacagtccacctcttattagtggacgaagctgtgagtcaccttccaaacgtgcattccacaggtgggaagcacagcacaagggaatggcactgtaaaagcaacagcattatacagagttgtttctccatattgacagcaaatcagaagtaattttctgcctaaatcagggcttaattcattagctcacattaattcacaagttcaatccaatttctcaaaatgcaataacacaatcttccaacctaattatcttcactgaaagtatttaaaagcatttgctgagacacctttctttcttgtgtcagacaggatcaacatcaagtgaacagctgggatagactacattctttctaattgca

SEQ ID NO: 64596 - DNA, 1228 bp, Bovine  19866881043856
  misc_feature (1)..(1): n is a, c, g, or t
ntcggcatactggagctggcatgcacgttcgcatctttgaaagttcacacctgtatttgaatttctcttctttgtctccttagctaatatctgtcacatggcaaagtatgagcagggtcctaggggtgggcagtgagcagtgtaagagtcaggactgggcagagggaagatcagcaaaggctaagggaggaggagaaaccctcagtgaacgtttcaaggaaacagttccttctctgcagccagcctccgggactcaggagaacgtgtgatcaggttagactcagagcaggaggttttgaggctaggccaaaaaggagccctatctccagctcttagtgggtggagagggatgacgtgccaatgagaacccgaggagctaggagggcagtgcaagatgcacaaactaggcatagacagaaatagatgagtcgaggttaaaaagtgccaggactgatttttcaactgctacttattaatagtggtcttgggccactccatgaagtcagaattttaaagggaatagttcagagcagtgtgtcagacatgtagcccattaaaggccagcttttctaaaaagaaaatttattctcctatacatatgtagattaggttaagtacttagactgttgttttcacactcaaattctgagttcaaattctacttccaccgcttagttatgtgaactccacccctgttttctcatctttaaaataagaatgggggtataataataattactcttgtctggcatttttgcaaagattaaatgagataatgcatgtaaaatgcttactacaacttctggcacatagatgtactcaataaatataagctatgcgaagagctgattcattggaaaagaccctaatgctgggaaagattgagggcagaaggagaagggggcagcagagaataggatggttgaatagcatcattgactcaatggacatgagttggagcaaactccgtgagatagtaaagttacagggaagcctggcatgctgcagtctgtgggatcgcagagttggacacagtcatgcgactgaacaacgaacacttatttagaaaattatttattgacataactttacagtagtatttagggttactttctgagatcttgtgacttctttgcctctgaactctaagagtggataaagcatgttccttgggttgtttgctcattttgggagcacaaactctggactggaactcagaacttagcat

SEQ ID NO: 64597 - DNA, 935 bp, Bovine  19866881072094
  misc_feature (1)..(1): n is a, c, g, or t
nccacagacacaaacacacacacacacacacacacacacacacacacacacacactcccccaggagttccggtctgattggggaaaagcagagcacaaacacatccctttcacctgcttaagttcatccataaaactgaaatgtcacagccacaaagtcagaaagcacaggcagggctgagttaaaaccataaataaaggtgagtggcagaccggcatttcagagagcgctgagagggagtccgggcgcgaatagctgaaaagggggaaggggaggcagttgccatctacaagactggcacagcaagagctgcccccgtagagcggcaggttcggcttcgtggagccagccaggctcacaatgtcctcttgcaggctgatggaaaacgtgaggcgccagtgcctttattcacgctgttgttattctttttacagaaaaggacagtggggtctagagccttggcaccggggcttatgcacacacacacactcacacactcgagcctttcatttaatgctcttacaccggtctaagatgaaactggcataagctctaagggttttcggggggaggtctggctcccaccaaaggaggacacgtaccgcacaacctctgcggtgggggctaagcctagaacacctcggcagcccttgaatcaacacgagaatccaggttcccttcgcgtggcattcgcctgtctctgcccaccagccccagccccagtccacgcaccgagcccactcactctgacccaaaacactggaaagaaatcagaaagcatgttccgctcaccctcaaagcagagagatctatttcatccaagctgcgagccggggagtcgctcgccatgtcgacttcttcgcgggagagatggaccaaaaccaccccgaagctattcccttggaaattccaccttggtctatttcacttcgcgt

SEQ ID NO: 64598 - DNA, 1991 bp, Bovine  19866881104742
  misc_feature (1)..(1): n is a, c, g, or t
nctgtggacttgtgccctaatcgctggtatctctcaccagctctcccctgcccctgtgcgtccctggcacagggtttatctctgaggagatggtgcctctctagaagcagataaatttgcttctgggtgtgaacttagtcccttgaagttaagtttccaagtccatggatcgatagcagacattcacatacatcctattcttgctcactgaaaagcaaagtccaaaagtgattctgaaattgccagttaaaaaaaatctgcctaaatttcattttactatgtaagaatcttgttcatttctacaaattgtcccctttacctattcaaccctagtgttactttttccagcttgcatttcctgccttacttagctcacctcagtgtcccctgacatatagtatgctcaatctcagctttagtttttcactgattcctacctccttgaactgtcctttcccaataattatttttttcctaactctttaaggcccagctctggttcgctcattccaacagaccttccaggaattttttatcggggtctttctcttcactggtgcctgttggtcttcggtgtgatttgacatataaactgtgcaaaaataccttcatggtgtaactgccatacactgcctgagttgtgtgttggtggcaaggattcctttgaaccccattgtgctttataaagagctagatgtactccgtgactggctgatccctatgtagctgattgaacctatttttgttgttgttctagtatttcagaaaatgtaagtttcctttgctttggattgtccttttatccatgggttcatctcttctgtttgtcaggtcaaaaaaattccagtcgtttattgagagctgcttggtaaagaaccacagccagcgaccagcaacggaacaactgatgaagcatccatttatacgagaccagcctaatgagcgacaggtccgcattcagctcaaggaccatatcgacagaacaaagaagaagcgaggagagaaaggtgaggtgcacatttttattgcagcgagggaaacaaaagacccaagtgtcatgggctcttgatgtgtttggagggaccgaggggatttcagatagcctgcattgttcttcagtgtgaggactgcctcagagatcacagcctgtgggcatcaccaggggcaggctgctgaaatggaatctttcatgaaagaatagaactgcaagaaatattaccttttccaggcagtgaacaacaagtcgtgttgagtgattctatgaaaggggtttaatatgacaagtcattttcttaattcaaatgaatattcatgtttcaaaggcaaaatctgcagaagacaggcaaccttaaacacacacacacacacacacacatctatctgacattttttcagtactggcgctcttcaccatttaagtttttgtgctctgaggctcatttttaatttaggtatttggaagtcagaaggacttttattatagtcacaggaattttaaagaggttgccaggctactgtatagaacattgcattttcccctttgttttatagattcaaaaactcttttttcttatggctctacctgtggtcccaccctgtcttcactgcatcactggaaaaggcatgagtccaacttggggtcctgggactgcctgcaagttgtttgaatagagactcagaattccttaactagcatcctgaccaaggtgaactcacctggtctggggggttttatgacttagttgtgtagggcagtagggaaggttgaggatgggaaggaaagggggagaatgcagagaacagatgggtgagagctccctggtggtagcaggaaggggcagctggtggggctggcagtgaggtggaagttccggtctgatgaagcgagcgctgagcgtgggtgggtggagtagaggggaaggcaagaggccgatggtgggggtccatggtgatgtgcttgtctccacttcggtcctctccacctttctcct

SEQ ID NO: 64599 - DNA, 1148 bp, Bovine  19866881112897
  misc_feature (1)..(1): n is a, c, g, or t
nttagtgagatgatcaaattctgtattttcccccctgagtggtcacaatttgactttgtttgcagtaaggaagttggatgatgacagttgacacatcaataattgcactgtttcagaagtctgcagtgctcaaacgcttttaattataacttaggataattatcaaaagagaaattaatgtcatttttatgtagacccttcatattttaaggggagaggaaatactggacatccaagatgtccagtctctaactattgcacccaaagtgataaacatcagggggtaataatgctatggttctttctctagaatgacctgttcaaatcagtgtgacaaaaggaagacagcatctgttaatcatctctggtcactgagaccagttccacctttctgggcaagagtcacttccctccttaattccacatctgcaaaatgagataatagaatggcttcttctcagctgtataaatttaaaagatctcctcggcagtaaaaactatttaagtataaagccacatgttttaaaactttcctaggtgttccttgtggagaaggcagggcgacgctctctgttcctaattggaatgagtgggatgtttgtttgtgccatcttcatgtcggtgggacttgtgctcctggtgagtctggtgtctgcactgagatttttgggtacccaatgatagcatttctgagccccaggttaaacatctgagacttacttaacaaaataaagcaagaggaacagcatataaaacaaaagagaaatgtaaagaaaaagaattagcttcagggtttaaagactgaatatcagcaagtgaatggtgcttgtcacccagagatgcagggtgtataataaccaggtttcaatcctggctctgccacttggctgcttgtgtgaccttgaacaagtacctagacctttctaccactttacagggtgttccgcatcctgtctaccgagcttggtatgagtagaagcagaggtcactggatccttgctttgcttcttccacaggaagagtgactaggaggcagagaaaatccgaagccacaggatttcttatagctcaaaagatttaaggatgattcagactaggaaaaaaaaaaacttgtctacgactcattggaaaagaccctgatgctggga

SEQ ID NO: 64600 - DNA, 1069 bp, Bovine  19866881166418
  misc_feature (1)..(1): n is a, c, g, or t
ntttaatttgtatttatctttttaatacacacattttaaatggattccaactcaggttgttattttaaaagcctgtgtttggaaagcgtagaatttagaaatctagaggacaaaaaaattatagggtcctcaatagatcaaacttatatacaacactggtgaacacaattttcaaggtgactggctgcggtcgtagtgttggaatgctttaaatattacggagccatttgattggtgactgagctcaaaatgtggctccaaataaccatgtcaaggtattgactttgtcctaaaggttccagcaaatctgaaaccacattagaaattggagtcctttaatttggagtcagagagtaactcattccagaacatttccccttatgttttccctggtgatggggtctagtgagaaaagccctctacacttccactgaaattatccatttaccacgcaaggagatttatatgccagcacgacacaatgtcaacttcagcagccaagtccatttttcattccaggcttccgtgaaagggctctttaaagtctacttgaaatattcagcaaggccataaaatgaaattctagaaatctgctttgcgaactagtcttccagttatagctttactgctcatcattatttcaaaggccttattcatcctaaaactacggttcctttctttcttacaaaaatgagatgccctttgcctttttggagagtaaagcttgtggttagtgttttctaatcaatcctggctaaagaacgggaatgacagatgatatgtgtttatgtttcagaaaggaagagtgggaagtgatagcaagtaaaagtagagcctgatgctgtggagaaactgaagtaaaataggtaacatttattggatgcttctaggcaattagcttgacttcacattccaggatgtctggctctaggtcagtgatcacaccatcgtgattatctgggtcgtgaagttcttttttgtacagttcttctgtgcattcttgccacctcttcttaatatcttctgcttctgttaggtctataccatttctgtcctttatcgagcccat

SEQ ID NO: 64601 - DNA, 1797 bp, Bovine  19866881336605
  misc_feature (1)..(1): n is a, c, g, or t
nttatgcatatactcaagtggaggcagtgttagaagcagagcagtgaaaagttcacaggtagcagctcaaccaatacctgtttttacagatgagaatactgaggctcagagaggttaagtaccttgcccaaggcacacagctggtttgtgacagacctgggaccagaactgggacctcagtctctcagctggtaaagaatccacctgcaatggaggagaccccagtttgattcctgggtcaggaaggtcccctgaagaagggataggctattgactccaatattcttgagcgtccctggtggctcagctggtaaagaatctactgcaatgcagaagacctgggttcgatccttgggttgggaagatcccctggaggaggacatggcaacccactccagtactcttgcctggggaaaccccgtggacagaggaacgtggagggctgcagtccatagggtcgcaaagagtcagacatgactgagagactaagcatatctcttaggctagggatgaaaacttcagcctgtagagattccaaggccaataactgaggttcatatttacattaacttagtcaaactaaatttgacttagatgaaataaggttgaaattatttgtttatgaaaagtagatacattctcaaagtgttcatcttcctaaactctaaatcgctcaagaaagggagaaatgggatattatctttcctccacagaaaggagtctgggaaaaaagccaaaataaaagcagactgttaggcagtgcttgtgcatgtccttgaccgagcaggttggatgaggtcatgctgcttggtcatgtttcacgaatgaatagtcctgtgaatcaccatagactctgctgctgctgctgctaagtcacttaagtcatgtccgactctgtgtgaccccagagacggtagcccaccaggctcccccgttcctgggattctccaggcacgaacactggagtgggttgccatttccttctccaatgcatgaaagtgaaaactgaaagtgaagttgctcagtcgtgtccgactcctagcgaccccatggactgcagcctaccaggctcctccgtccatgggattttccaggcaagagtactggaatgggttgctatttccttctccatagactctacatgtatttatatagcatatgcactgctgtttttgatgttgtccaaacgctgagtttttataatgcaccatttggattcgaaagttatagagcagatgaactttatttgttgcagggaaaagaacacagagcattctattaatattacagcttcatgcaccgtggacaggtttttcctatctgaatacctctttgggtaccagggaggattctgtgtggttggactctgcttaaaattctgctgcttccccagctctaagtgggaatgttggtacttgccacacctccttcacagacttctaaagattgaaggagaggatgtctgtgaaagtgctctgtttgggagggggaatcctaccttgtgaaggatgaaatggtttggattcataacaagaaggggaaatcttgaatcagattgggcttttgtggttttctcttcatgtgtttaggggttttgggatacaggttttatttttacataaaacctttttaaaaaatgaaaacttaaagacatttatccccccaaaagatgtttcttgtgttcatgtttgaggtttatatttacattaattagaggagcctggtgggctgcagtccatggggtcgctaagagtcggacacgactgagtgacttcactttcacttttcactttcaca

SEQ ID NO: 64602 - DNA, 880 bp, Bovine  19866881392269
  misc_feature (1)..(1): n is a, c, g, or t
naaaagatgttttgtgccaggaacaacagtggacatttatggcatctgaacagagtcatatctgcaaagatctgtgatacagcaattagagacttaagtagcaatataattaaagaagacattgtttcttgaagtataagactcgaacaattggagacagaaagatgaagaattcaagcacaatataaagaaataaaatattggagtgaggactgtgtctggcacactgattcaatccagcaaggggcacagagctgtatccctgaaatgatactgaaaggctttgagaatacaagactagatgaaatcatggcttccctagtaatttctctaatcatttctgattcacagtttcttctgcatcctagagagaaaagtttggggataatacagttttgtttgcatactgtttatatgatattgtttttgtttcatttgggggctttttttttttcttggtaaaaagcatttagtcaacatgaaaggttcaaagacacatctcataacccactacccagaaatcacatgttaatatttgagcatcactcagaatttctctaaggatacattgaagaatgagtagaaataattttacagcatttttgttatctagctatgtaagtattgtatgttatataattatatcattatatgtcaatataaatgttaccagatcttcttttaaaaagcataaccactaagtaatttgaaattaaagctagtgtgtgctctgggaaaccctgacattgggggctttgtttagagggtttgggggctctgtttttaactttgaaagtgaaagccgctcagtcgtgtccaactctgcgaccccacggactgtagcctgccaggctcttctgtccatggaattctgcaggca

SEQ ID NO: 64603 - DNA, 923 bp, Bovine  19866881447763
  misc_feature (1)..(1): n is a, c, g, or t
ntggtaactgcatagaattacctgaaaggcttcttacccacccgccacccccacccctgccccagagcttccaattcccacctccagagtaggtcagagaggcaggacctgagatgatcctgaagctgctgaaacgaggatttcactttgagaaccactgttaaggcaattaacctatcaaccagctcttagaaaatcacaatgcacagggcagcatttactgagaatctaccagctgcagaatcctctagcatctactggataagccacactggtccttgctccaaacactcaaaattgccaacacaggacacacatgcaaggggacaatacacagacatgtgcccaaaacagcaagaagtcattactgcggtgagattcaagatgtttcatttctccagtgcgtttctttatgatgtatcctaccgtgcaatttaatgtatttttttttcagatggaaattactaaaccacaatgcatagccattctccctcacactaccccacttcattgcacttactaatgagaatttcatctgagaccagggcatgaaatgtagtgaaggagaccattttaaagcttatttatatcatgaatattttagggtctgtaaggaccagagcaatgatcaacacagtccttaatggtcagatatcaagcagaagcattgataaagtactgatataatctgactttgctatgaggttgaacaaacagacgcacaaaagcaatccaacggaaccccaatctaactcaccaattatcgtataggtttttaaagcctagcaagcattaactttaaatgcatacttttctcatgaccctgttctggatttaagtacatttatatccagattataatcagagagggtatttaattagataatgtttgcaagtacttgaagatataaagtgctctataa

SEQ ID NO: 64604 - DNA, 1616 bp, Bovine  19866881496937
  misc_feature (1)..(1): n is a, c, g, or t
ncttccttagctgaacttaatgcttttgtttttaatgacacaacaggtatttcagggaactgtgtggtctcaggcctgctttcttctcagtaaaaacacagacttcaatctgtctggtagaaaaaaacgattggaaaagtgccagtcttcaagtgtttaatttctctgcattttcaattcgagcagatgctcccaaccagtacatatgcaagaatggctaaaggttgcaggaaaatggtaattaaaatcatcctcataaggtgattcatttgtgaatatgctaccactgactcaacaaccccacattaatttaatcaaggttaaccggaacacaggagaaaggcgggacttttaaaaaagagattggacagtggttgagtcctaaaaaagattggcccaaatcactaggcatcatgaagaagcacttttcctttgtaaagtctggaaaagggaagaactatcagacaaggatctacagttgcctgtttagtaatcctgccgctcttgggattctccagaaacagccagcctgtcctggcagcttgaatttaatgtacttcctggttaagcatacctccaaatgtactctagaatcaagaggggtaggtgtaaatgggacaggatctcagagagctgttagagttgagaaagaaaaagaaatggaagaaggcaagacaggggaaggagagcaggaaggagaaagaaataatggagagagggtaagagaatggaaaaaaggaagggttggaaggaaggaggcaaagaaggggttcctattctacagatctgctcattgttagatggatcatttacaaaggatcatggacatgaattttacacagtgaatataaaaataatgtaagctgcagaagtttctaggaattgtcatttcaccaccctttccagggcacaactgctcagaagacaaagaattcatagatattttgaaattctataaaattttacattagggtctaatacttagaaacattaaggaataacagcaacccagcatcaacccctcttgcttccttctaccttctcccaaagtaagggggaatgagttttgctgaggccatgctagatttgtgtcacctaagcacaaaaataggactgggcttttctttatttgaaatgcctgcttgggagttctcagccttcattattctgtcctccggctgatttagaatgcagccctgctctacacactttcagagttgccaagagtctaatccaagtgagttgtgaaatctggatgcttacatgggaaaatctgggtctaagctggaaaagggtacattttacacaaagggaactaaacagaaatttggaaaaaacaacctgaaaaacaccagagaatgccttgaaaacacttccttcccctggcctttgagaaaccagaagccatcgtcttccaagttgaaaaatcagtccagcttaagtgaaactgccttccttctgttctccagagcagatgattatcatatttgactattctcactcagagtctgttcagaacagcctggccagtgcaaaatccaaaaacatttcactctcagatagccgtttaaaatgcctctcataatgacaagactagacatggcaaatggcatttt

SEQ ID NO: 64605 - DNA, 1990 bp, Bovine  19866880432252
  misc_feature (1)..(1): n is a, c, g, or t
ncaagggtattctgatttctcaaatagtcaaggttgctcaaccttctctgaattcatcctgccaaaataattacttgtattacagagggtggtgttttttttttgtaacatggactcagagcaggttgaattaccttacctgtagtggggcttcagtacactttgaatcccaggtctttcccaaggggcatctccagggtcaggccactgggctctgtcattggccctggcttgttaaacaattttgttaatgaatgaaaaatagaaagaaaccagatgacccacagctgggatagttaatatgatacatgacatattcaagttcaaaatgatttatataggatggaatgccaggccaaaaccaacataatgaaattaaacagggatgaacttcaagtcctctgcttagctttggaatgtcaggcaccagggtaggacagacctggcttggaaatactcgtttgtttagtcaattccacgtatatttatcaggaccactgtgtgaaagatgctgtctgaaccctcaaagggagtctgatataaacatgatatctcaaaatgctaaaggtttggtagtgtttgggggaagggatatgcatatctatataaacccaaggtacacaatatgaagtgtcatgtaagtgacaagaccatggggctgggagactttctcagagacagatcatgctcagctggaggaggcttcatgggagaggttcacagtgtgcactgaaaaccaggaaaattctgtcttttctttttcagcaggtagctatagtgaaggagaaagaagtaacagtggtggtcagctaatgggacacgttgggggagtggggagctatgagtaccctaagtgacaagtgggcatatgtgtacactcatgtgcctgggtatgtgcccatgggagtggggagaggatgcaaccaggctgtgcacagaccagaaagacagtgttgataacgtgggctttcttcagtggtattgaaggtctttgaaaagtgggggattcctgggatcaaagaagcactggaggtctgttcatctggccccagggtgtaggatgaatggatgggagactggagaggccagaataccagttgagaggctaaaacacccgtgagacagggccttgagattggaaaagcaaagaaactgcagaataaactgaagcaaagattcacatatttggcatttgttgggaggctgccataggggtgggagttagaaagaaagtgatcagaagtgactgcattttcagaaagaagaattgtgctggtttgggaaggagagaggctgtgtttaggttgatgtcttctaggacattcccaaattggaaattcacaactggcggcgtggagaggcggtaggctgagacagcttcagtggtcttctgcacagattggtctctgcagctggcacagtgagaggccaaggcaaagcgaggagcaggccaaggacggcgcctgtgggtgtccctcgcgctcgaggagcccaggatggctaatgacagcaaagagccagttcatgtgcaaagtattgggagtcttagctaatcacaagcttcccataacctagtccttttttctttttttttaagaaaagactcaatcccaggctttatgtctgtatcccacaaatataggacttgaaattttttatcctgcccatgtgtcctcccgggactctgtgcggtcccatctcctttccccgagctctctctcagtccaggaacagaggccttgagggaatgggcctcagtgctttaggctgtaacctggaggtgcagatgtggtgcctgaggtacagagaaaagagggaaagggaacaggattattaatccattaggtaaaggtcctctaagtgctttcagtggcaatcaggttacaggtctcacatcagaaaatttatagacccatccacagcctcatgcggaaaggtctgaaagaagccttttcttattattatttttaaaatatataaagccacaatc

SEQ ID NO: 64606 - DNA, 1807 bp, Bovine  19866880892006
  misc_feature (1)..(1): n is a, c, g, or t
ntgtgtgtatctttattcgttcctcttttgatgaacatttaggttgcttccagtcttggctatttgaaacaatgctgcagtgagtattaggctgtatgtatccttttgaaccatgtttttctttggttatatacccaggagtgggatttcagggtcatatggtagctctatttttagtttttcaaagaatttctgtactgttctccatagtggttgtaccagttgacattcccaccaacaggtaaggaggttcccttctctctacaccctctccagcatttgttgttcatggatgttttgatgagagccattttgactggtgtgaggtgatgtctcattatagttttgatttgcatttctctaatttccaggcaagagtactggagtggggtgccattgccttctccgaataattagtgaacatcttttcatgttcagcacaataagctttcaataagttatccgctttattattgttaagaaaatacaatacaaagactactattactaattcaaaaccaaactaattcaaaattctttagaaatggctttctaaagagagccatttgattagtggtagtaggtataaacagaatcactcggtatggggaggatgctgaacagagcgggcctgagcagcccagcaggtctggactcctgtgggactcttgacccttgaccctcagtcagtgactggaggggacactcccaaatatgaatcagtcccaggcccaaagggagcaggcagagggaagagcaggtggaagagagagatcaggccatctgcaagctgaatgtcaacaccccacccgggcctttcccagtcagctgttttgccctataaaacccaatagacttttcaagtaaagcaacttaactcagcctggtgttttcctttcttctctctgcttcaggacccttttggcctcatcccaatgagtcagtttctaaggcaggtagaacctttcttgtgctttgcatggggcctctttgatataccaaagattatggattcctgcctggaccatccctgggcagcaaggctggggaggacagccttagtgtctgaggacagctacagaaatgtgaaattcacagctacagctatgtgaaatccagatcagagcagagatgtggacttcacagcctgggcaggtaccattctatactgataggagacccatgccttccctgcctcagtggctccttgatgaaatgtgtctgaaagaagacagatatacccagggatgggaaatatgaaattataatgcattccttagctccaagtagaaactggaggctcagatttttaagtagtggattcatcagggaaggtctcattctttgccctctagttatactattccagtgaccttggctcagttcagtgaaccttaatgaaaatattcaagcctggtatgcccagagccaaccctggctgacacattgtttccatttttaccttgaggccctgttctatgtttatcaagccctcacagtgtcagcccattggtgttggtttactgatgcatcattcattcattcatttgacattatttattgcgcactgaatatggtaataggctagggggtggggacatgaataacacacggtttctgtgcttatggcagaaagaaacaagcttgcaaaactgtgggtatttgataagccttttgatgcactgtgtggatcacaacaactgtggaaaattcttaaagagatgggaataccaggccacctcacctgcctcctgagaaatctgtatgcaggtcaagaagcaacagttataacagcaggaacaacgga

SEQ ID NO: 64607 - DNA, 1818 bp, Bovine  19866880991260
  misc_feature (1)..(1): n is a, c, g, or t
ntctctgagggcttcccccttttcttctctgggaggggtccagatccagaaggggcacctagcgctggtgaccagtgtgtaaactggtagcagagagagaagctgctccagatttcagttcccctgtcccttccttgcagctttgttatcttcagcgtctgtgctgctcagggagctgggatggccctgggggaagattgctatgttgggcctatgggaatcggatgttcgggatcttgccctttgctctatttcttagagtccacttaggaacaccaaaaaggccctttagcaacaagcagtttgtgggagatgaaattccacaaatccaaatgcatcaacccaactggggagagacaaagacagattgttacagggagcctgttaaacttcgcttggattccttttctcctcctcctctacctgatatacaggtgagagatggatcgactgataaaggtctccagaaaacgtgcgacttagaggtggagaggaagagagatgacagacggagaggtacttgagtttgcaacacttaagcgttgaaggcactgcctaaacagtctctgagggacggggaggaggggagtgggagaaccatttatccgtcagggagggtcctcattctccgcccaggaacgccgggaaaaccaggtatgcggcgaaagcaatttctttttaaatgaggagagacgggggtagagaggtacataaaagaagtaaatagaaaagaggggagataaaaagaatgagagaaccactgtgacctttagggcaagcgaaaagaaagaagagatgttaaaggagagagaggttgaggactgacaccgagcaaagacccgggtcctggaggaacttcacgagaaagaggggccacacgactgtcccatccccatgtttgggcagattaatggagtcgtggctccctcgcttgagtcctgccccgggaggggacagtatctgtttagatttgtgtctaaatttaaaccctgatcgccggcctccttccccagctccccaccctccccgcctcctctctctcccctcccctccctcctcctcctcctcctccttcctcgttctctagcgcggggctggggcggcccgcagtcagccctgcagccggcgagccgggcgtgcagccgctcacttgcgctgtgcccgccggagccgaacccggtccagacgggagcagagcgctgagcggggatcgagagcccgggacagagcgaacgcgcgctggcggcgctgagtcggcacctggaggacatggaggtaaagaagcccgcggcgcgcaagcagggtccgagcagggagcacgagcgaggctcagcgctgcggcactccggaggctagcccccggcctttcctaggggacccctccccggcaggcagggggtcggccgggaggacctcagggagaggggaggggcctttctagaggttcagctgttttgcttagggactcaaatgcttcagaaaaaaaaaaaaaagttaggtgctataaactttgtaaatggacaaatgtgtgagcaaaatttctgatttagaaatcagaagccgctggatctgcagagatgaatattgaaagagaaacagagctgttaccctgaggcacagcgtctatgggcttcccttttcgatgaaaattgagcttttaaaagtccggttgccctcttgcttctcaggtcccacttttgtctgtcacatctttcagaactttctggaaagctcccctcatgggcaaatggcactatttctgatcaaacttgagactttcctgtatgtccctgcatgcactggggtgtgctggctaca

SEQ ID NO: 64608 - DNA, 1166 bp, Bovine  19866881332165
  misc_feature (1)..(1): n is a, c, g, or t
nctctgccttgaccccaggacacagcttccgtcaccttctgggtagataaatgcatatcacctctcctgccaacacagtacaatgcgatggactccacacttgagttttgcggccattctgagctgcttctggtatcctcagtcctgtagggctttgctcccgctgcccctctgccccgaacctccctgctcttccctgttctcctgagagtagttttgtcatgaagtgaaagtgaagtcgctcagtcgtgtgtccgactctttgtgaccccatggactgcagcctcccaggctcctccatccatgggattttccaggcaagagtactggagtgggttgccatttccttctccaggggatcttcccgattcagggattgaacccgagtctcccgcattgcgggcggatgcttttaccctctaagccaccagggaatccccagttttgtcctacgggggcttttgctctccagccactagtccatttagggggccagggctgcacagccaagacgaaggggtggggcatggcagggccccttgtctgtcctgacccacccaactccctgtcaaccctctattctgagatcgctgggtcagcaaaaagaggctgagcctctgacaggcattctcccagttatcctggggctgccgtcagcccccagattcacccgtgcctgaggcgtgggcctcgggagttttccccgctccctggagagtctgccaccagcgccttttcccacagcaggctggtgccctgctatgaggtcccgggaggagtttttccccacccctgctcctatctctcttcactgtcccttcctcgtggaggcagtgatttccccccttatcatctggacaggagaggatatgagctgaaaaggaaccatgttccttttagttgaaacctctttaaagttgaaacctcaccatggccagattctggagtgtattttccagccaagaggcctaggtaaagatacaagcagttgtcagaatggaaccaggcctgccctccataaaaagagactgaccagttgctaccccagctgggagcacacgttttctaatgacaaaaactgtgaacaaattcagagctgatgaacaatgttttttgccccgtctttccaatttcactgccagttttgtcaaagtgtatttgtggac

SEQ ID NO: 64609 - DNA, 1191 bp, Bovine  19866880466075
  misc_feature (1)..(1): n is a, c, g, or t
nagttctgagaacaagccagatatatctctgggaattgtaagaccccagaatgtcatgttaccaactctagtgcagaaatccttctgggaaattaacccaaccaggtttggtgagattcagcaattttcagcagttgacaaatatttgccttttatttcatgcgaacatttctagtaagagcatctcctctgtttggcacagagtaggtacgcaataaatatgtgtggaatgaatgaattttaactgttctttgtgttccaagttccttttccatgacttcatgattaagcgtctggcgcataataggcacaactgaaaatgcctgttggatgagtgtgcccttcaccatggtcaaagtagtaagattagggactttagaattggacttaacttgagtttaaagttgtgaacttgcaaagggcatgttccttaatctaaggctcaatttcatcatatgtagaatgggagaaataatacaaaattaatttcctacttcaaaggactatatgtagtgagaactatatgagtacaaataaaaacagttaaatatagtgtgtgactcagaaattaagttcaatacattttagttctttttcacttcattttcatttgtagtcacctcttctctattattacatccatgcaaaacaaaacaagatgaagtaataataatcacatcaaagcccatgatcgaattagaaaagtgtgtgcatatgcatgattcaccctgtgtgttccatggcctgataagatctggttatgttatacatgattatatatatacatgacatcttagacttttaagcctttaggaattaaaagcatatttttattttgtgagacttttgtaatctacatacatgttcttgaaggtgattcattagaattggataataatgatgtaagttattttaatagtgttaaatatgatgacatcactgagatccttccaggggaaatggtgtttgttttctaagagctgttcattgatcaaattattttcataacattcatggtagaggatgagggtgagaatgaagctggtgttaatagggaggaaatggaatgatctaagtatttaaaggtctgtcaagtcaaggctatggtttttccagtggtcatgtatggatgtgagagttggactgtgaagaaagctgagcgctgaagaattgatgcttttgaactgtggt

SEQ ID NO: 64610 - DNA, 1709 bp, Bovine  19866880534410
  misc_feature (1)..(1): n is a, c, g, or t
ntcaggatgacattagcaagcttgccttgtttctgctttgcagaaagagtgatcacgggcttctatccttagcttgtgctgtgcccagatggagaagtcatggtttccatgcttgagctgtattgggccttatctggttgaccacaccttcttgcaagactcagtgaagaaggatcgtctgagtccaatctacagtcacacaaaacccttacactttctgtgttagtcactcactgcaggtaaagcaaggagaaggtttttgatgaaaagaaaaaaaaagagtggtttctcagtgctttgagttatatattgcctacacttcttttattcaagttctttatcttccatttgtctgagtttaccagtgactatttggcacgtgaacagtgggactaataaccttttcttgatagaacctactctacttttcactgcacagtggatgaatcaacatttttctgtgttgatggcactgttaagaaaccctaaacctggagctggagggaattctagtgtgttctttgagcttcctttgtcccctgagattgtgctctggcagctgcatactttgggacttttcatttgtatttatgactcagcctgactgcttcttgaagagagagcacaaatcattttgtcttgtattcctcttacctgtctttgtgcttgtttgagtggtggatgtatgagtgaattgattaagaataaattgattaataaatttagacctaatatttgatgttagtgttgtttataaatgacgttttaggtagatagcctaataatttgaagaaatttccttcatagaccttcagatgctaaataagagtgcttgtgataagtttaactttcctgcagctccagcttctctcctccatattacctatgctgcctgtatttgcctctctgccaagcctggagttcgtgggttgccattctgtcctggccaccataaaatccctgacatgtttaatggctgcaacccagctgtttatcttctcttccttgaaattctctccttcctcttcaaagttacacctttgacctgcttcttctcactgcttctttcagaggactctattctttcacctccccaaatactggtttttctaaagaatcagtctctttcttttctctcaatttcttttctctctttttagggaatcatctatcatccatcatctctaagcacacttgtgtctgttgccctgccatcattttatagtccacgtgtttatttgcttgttccacagtcctagttaggtgtcctagtacagttcagtcgtgtccaactctttgcgacctcatggacccagcatgctaggcctccctgtccatcaccaacccccggagttcacccaaactcatgtccattgagctggtgatgccatccaaccatctcatcctctgtcttccctttatcctcctgccctcaatctttcccagcatcagggtcttttcaaaagagtcaactctttgcatcaggtggccaaagtactggagtttcagcttcaacatcagtccttccaatgaacactcaggactgatctcctttaggatggactggttggattgccttgctgtccaagggactctcaagtgtcttctccaacaccatagttcaaaagcatcaattttttgtctctcggctttctttatagtccaactctcacatccggacatgaccactggaaaaactatagccttga

SEQ ID NO: 64611 - DNA, 1300 bp, Bovine  19866880719933
  misc_feature (1)..(1): n is a, c, g, or t
nattcttttctgtggcttttttccctgataaaggcatttagaagaccagaataagaaaaaaatgaaaaatattgatcttctaaacactcatattggtttcagtcaccactatttggggtaagagagaacagggaggctacaatttgagtatactctggaattccaatgtaaaaagtcttcattccacatataaatttagactctgccttaattagtttctctaagaaattttattgagaaaccagccttctgtaatataacacacaaacactaatttttttcagtgtctactacatgcaagccacagtaaatggtatgtcaacatgacttttatagttagttttagttaattttatatttagtcttgaatctgacctatttttcacatgagtctgaccatgtatttatggccagtgtctcaggaagaattttcaatagacagaatcacagctccatagaatgttaaaagtgtatcagacctcagaaataacctagttcacttgccttattttacaagtgagaaaacagattccttgaaagatgaagtgacttgctcaaaaacacataacaattaagcagctgtaactgggaaattaactattcatacattcttattcttcttaaatcatccatagccattctttttttccccaattaattcattcactaaacagctgggaggggggggcgggtttccagtagtcacgcatggatgtgagagttggactataaagaaagctgagcacagaagaattgatgcttttgaactgtggtgttgaggaagatttttgagagtcccttggactgccaggagatccaaccagtcaatcctaaaggaaaacattcctgaatatttattggaaggactgatgttgaagctacagctccaatactttggccacctgatggaaagaactgactcattggaaaagaccctgatgctgggaaagattgaaggccaggagcagaagggtgtgacagaggataaaatggttcgatggtatcaccgacttgatgggcatgagtttgagcaagctccaggtgttggtgatggacagggaagcctggtgtgctgcagcccaattggtccaaaaagtcagacatgactgagcgactgaactgaactgtttttatatccaattggtacactatgtcaacgataatcctatatgtgagatagcaaaagaaacacagatgtatagaacagtcttttggactctgtgggagagggcgagggtgggaatgatttgggagaatggcattgaaacatgtataatatcatatgtgaaacgaatcatca

SEQ ID NO: 64612 - DNA, 629 bp, Bovine  19866880812772
  misc_feature (1)..(1): n is a, c, g, or t
nctggaaggcgtaagttacttggatcccttctgaagtgtgtaccttttcttctctcttccttcctcccttcatcttttttgcctgtgacattttgctcctcaccaagaaaggtaatgtggtttctttaagaaaatacttatagtaataaaaaatgactttaacagcaaaaactaataattgctaaggagccaattaaattctgaaagcgagatgaaactcttcttatttcccctggtgattttatgctttaaactcgcttccgtgttggaggaggaaaaaaaaaagagagagagagaaaatataatttcagaagctgacagaactcattgttcgagaaattttaaattcaaaaaagttaataaagcccaactataagatgaagggaatttgcatttcacagattaacaacatgtacagcaagaaaggcgatctgccttgccccaggtgataatttaagaaacctttgcatattttatttaaaactgggcccagtttggctgggtaataaaacagacagataatgattagaaggtcgcccctccagggcacacagcttgggccccagcaaataccaaacaatgaacccacaagcctggctggctgaagattagtctaattgcctgctgag

SEQ ID NO: 64613 - DNA, 1008 bp, Bovine  19866880854575
  misc_feature (1)..(1): n is a, c, g, or t
nctattctgaacctgcagcaatctggatttggccttccttatgtatccctcaccctgaattcttactccttatcatctaatcacagaagagtctttttgttgttagcttcttggaagcaaccaatggagaaattcttaatgcttcttttctttcctctgagccctcacttccctaattcaccaactgctcttcttttcatgttgcctaaagttccactgctcttttgctaaacatctttttctaagatactaatttacctagctctatgtcttattcacaaaggtctctacaatggcaccctactccagtactgttgcctggaaaatcccatggatggaggagcctggtaggctacagtccataggatcgctaagagtcagacatgactgagcgacttcactttcactttccactttcatgcattggagaaggaaatggcaacccactccagtggtcttgcctggagaatcccatggacggagaagcctggtgggctgcagtccatggggtcgcacagagttggacatgactgaagtgacttagcagcagcagcagcacgttttatgccgatctttgggtattctgtattgcaaggtatttcttagagagtttgtattttaaaaattttggtttttcccaaccagattgtgcatttctggagaaaacaactaccttaaattgaacaatgactagctttggcaacaacagtacaaatgagatgcatgtcaattagcatagctcttttctaccatagacattttgctgtagttaggtctatagtcttgaaatatgcacatactgtatttaaataaaacagaggcattaaacatatcctgtaatgcaaaccatgctaatacacaaattcagtgttaatactgtcatggctagtattatggagtgtgatctatggttctcctaataagctacctgatttttaaaaatggaattctttagtaatccttgctgacagttcaattccataggttttatttttacatacagttcaa

SEQ ID NO: 64614 - DNA, 2293 bp, Bovine  19866880889601
  misc_feature (1)..(1): n is a, c, g, or t
natggaggagcctggtgggctgcagtccatggcgtcgctaagagtcagacaccgactgaagtgacttagcagcagtagcagcagcaaccttagaaagaacaggagattcatcatcctttagtgtcataggtatatacactagaattatcttatttttattagtcccttcttctccagggaattgttcatggagacatttgttgcattgtagatgaggaaattgaggctcagaaagtccatttaacacatggtttattaaagttcaactctgtataaggctccacttggggcactgcacacattcagaatcttgtaagacaggggtcgcaaccacactggcgtttacgatgatattggagaaatgacctgtgtaaaaacaactttacagtaaaacatcctacatacctgaaactctgttgcttagcaagctcagctaccagaacacagtgatcaagtagtctgagcttaaactcatgacctaagcttacacacgtgatctataagccctttcttagagcctcattttagaagaaatctaaaagtcttggccctgatgtactagctgtccccagtagatgaaaagaataaatcagaagagatatttgagcctgctaggaagacctctgcagacaagatacaatttgacagcgatgaaatgttgacaacaacgatagctgtcaacaaggaggatacaaaatctattgaaattaacacaaggcaccggatgaaaaagcagagtctggggctacttagcatataagcaataagctcaacatataaacagaccctggtggtgcctcacaggatgataactgatcgtgactggtagagccttatgaggcagtcaacccacttggtagccagaggaacaacgtcgtatttggagtccttaaaaatacccattttctaaaatatttactcttgcgaaacatttctttccacagccatgtctaataatagaggtggtcctggagtgagaaacatttcttttgcagggacaataaagagttcagaaggggtatgagatcttgccttctaagacactcagtgttcgcctcatgcaagtgtggggagccactgtctctgtttagtgccctttgtgtccaggtggtgtgcatgcatgtgcacatgtgtgtgcttaccttccatgcagttatctgctttttccctctaaaaaaaccccacattggtattttcctcttcttggtgctctgggaatgaagaacctgtttttcccctcaggtgaaagtatctttaagttgttctgccctatctttgtttctgctctactttgatgaatgataaaattttaaaaaggctgatctgccttctgctattggaaaaaattataggtattccacacttgtctccataactgcagcatgagcagtaaacctgcactttcactgaacactgacaatctcattgttttgttcattttggtgcctgagcttgacgaagtggctttgattcgtaaggggtgggggagtgacaggaagaggcggccttgtagatgaaagccctttcaagcacaagaatgctgactggtgagggaggaaaaaaaaaggcagctggtttgagattttttaaaacatattttgccgaggagccagtgtgatgcaaatggcataccagagcatacacgtgtacactttttccagagacgtttacttcaaatactcaccacagatggtctctaatcaagaacagtcaggccagcccctgctggtgaggacacgacttccttcgggagcagaaggtttctttgtaaggcaggccccaaatcataaacatctgagagaacctgcagccagaggagctgctgccaccacgttcgtgatgaccctccgggtcccccaagccccagccctacaagcactgtcctgtagttctggcaacaggtcatgcttctgaaagggccagccactgctccagctccgtgggccattctcacagccctgctgtgctgggtgagctgtgtctgcggagcctacgttcagcaggcaacgcatcttctaggaggtccagcttctggaaaattacccatttatgactgagaaatcagaggggttcttataactcataaaaagtactgagaagagaggagatgatacaaataaacttgtttacaaaacagaaatagactcacagacatagtgaataaatttatcattaccaaaggggaaagggtagcagggataaattaggagactaggattaacgtatacacactactgtatagaaaacaggtaaccaacaaagacttgctgtatagcacgggaaactatactgg

SEQ ID NO: 64615 - DNA, 1477 bp, Bovine  19866881007271
  misc_feature (1)..(1): n is a, c, g, or t
nacaggtagtgttcactcttgtatcctgctgtttcccgaagcgtctctcttctccccagtccaaggctatccattctttaggaagcaactgaagttcttccttctccccaaagccttaagccatccttctgggatactcctcctcccctgagctcttatcaccctcacagactccaccacacatcccagaatctgcattctgcagcctgctaggcaaacatcatggcgagactgcccttctctttacaagaggaagctgaatatcatgagaggtctggtgacatgtacagagtcatatggctcgtttctggcagaatcaagataaattcctgctacttagcatgtaatttcaaaacgtattttagcttgggttttacttactacagtggtattactcctgatccaaggaaactgaaagaaatctaaggcaagctacctatgcctccctataacacctgaaacacacacacacacacacacacaccccccacctcccttaccacaggacacaaggtaggaactcaataaatgcttgaaaattaatttgggcttattatcacaaaaagattaatcactgcaagacctgtgagcccctgttcacagtatctttgagtgatttggaaatgccttctcttaagatctttaaacaaagggagaaaattgtctggtttcaatgaactactgcctgaaggcaggggataggttggctttaggagtttcacttcatcactataatcctatgaagataagaaacaaggcagttgaaaaggagccacaatcacctgtaggctcgtgaagcctggccctgccacccgtcacgccttactcaacgcctttcctgtgggcagtactgttgcccagagaatgtccactgtatcccaacatccagggctcctcaaccaagtcgaaggctcagaataaaactgcaagtcacagtggttaagagatctgtttggggtttgagctttgtggcctctggcaatttacttaacctcctgagcctcggtttcccacttgggggtaataatctcccaaggttttatgaaagatgaactgaaataatacaaatgaagagcctgataagaacaagttctgggcatcatcagccacgagttcctatatgtgctccagagctgactcactttggagcagctggtcatttcagtttcacgatctctagaagagctctggagtgagttggtcaaatttatgatgggaaaggtatatttctgttggtgcaccaccacctacccgccagatgtcttgggtcccagacaaatagaggagagcattccaattcttgccagcagcttggggaagggctgtgatcagacactaactcttctgaaacataggctttcttctcttccatctctcaaaccttgcaggttcttcaaagggtttatactttcaggtagatcttattttgaatatcagtgttgaagttatactaatggattttttcccctttcttttt

SEQ ID NO: 64616 - DNA, 1233 bp, Bovine  19866881418582
  misc_feature (1)..(1): n is a, c, g, or t
nttgggggtgtcagaatgtgttataatttggattgaaatacgacagcctgtcaaaaaatttccacaactgataacatccccctgggttaatagacaaaattataagatggcataatttgtgtaatctaattcataaattccttgtcataaagtctcaggggtggtattttataaatattacagcactgctatataatacttgatcccttatgtttgaaatatctttacaaaatagtgagaagatgcatatcaattcagtttgataagagtttgtaggtaactgataatacatgacacacactcctagatgctgtgggggggggtacattagaggaataaaagttggctctcacttaaaaactcgctgtgtaaactatgtacacatcgaaaataactgaagatcattgcaaatcagtatactcaagtcctctataaaccaatgaactatgaaagctcatttggttctgtgatgcgataaaggctgaaggggtatttaagaactcaagatagatttgaaaaatggggagcaggacattctaggtggaaggaactttatgagcaaagtctccaagatcagaacaagaatttgatgtacacatttagctgttttatcacttaactactcactgtaggctagcctatttgtttgatcattatacagtttaaggttgtttttatagttatgtattgttccatttatgcctgcagtggattgttggcggacagacaagatgcataagaaggattgctgtgaaatataagtgaagaagtatggtaacaatgataataattaaaaaaaaattatctttcatgggctgaattatgtttttcccaaattcatatattggaagggaaaaaggagaggaagccatgaaatataagactgggtaaccttgggcaaacttatctgtgcctctgttcatctgtgtgtgtcttgtgtgtctgtgtgacatagacaaagagttcagtgctgtggggcagccaaagtaagggcacaaagctaatgaagacagtaataataggcacttttattgagtgtgtgctaggaatttcatgcattatctcatttagcaaatatgaataaccgttgttagtatcttagtttttacatataaaaaaatgaggctcagaaaggttaaattatgagcccatggccatgactagcaaggtgacaaagctgggcttctaaccctcacttttttgtgcttaaggaaactcattggccttaaaaaa

SEQ ID NO: 64617 - DNA, 1275 bp, Bovine  19866880360867
  misc_feature (1)..(1): n is a, c, g, or t
nggaaattgtatttttgggggtgtgtgcatgctcagttgtgtccgactctttgcagtcccatggactgcaggcccgccaaggctcctctgttcatgggattttccaggcaagaaataactggagtgggttgtggtttattttcaggaggggcattagttataaatcccacagttggtacatgccagctggcagtctttacagagattcaaaaagtacttgagaagacattctttttctttttgacattcatatatgttggacttgtgttaaacctagaagtagcaaccagaatcctttctagctcagttgtctatacaattaagtactcagtaggtgaaatttcatcaatgtgagtaacttcaaggaaagattatagttgatgcatctcaatgtcttctcactctggaactgcactcagcaattgttctgacagccgtcttacgattttcacacttgggttcttgacagtgttaagaattttattcacattcatactgagagatggcttacgtcccagcattttgtaattattttactttacctcctgcatcctggggtcatttgtgctgtgttcccccaagctgctcaggaatattgcaaatccagtagacttcatgctggtgaccctccgaatttaaggacttgagggataactgaaatcccagctgtcagtaactaagttcaaataagggactgggttagttagggcagaagcagatttatttgtcttctttctgtctgtggactaacaggggtcattcagtgaaattgtgctgtgctacactttcttcctctaaacaaaggttaataaaagtgccttttctctccctgcaacaaagtgatactgattaactagatgatgattgtgtaactcatgtaagtggtctggaaaaattcttaatgcaagtaaaaggcatgccaggagtttgttttctttagagcttagaaaagtagtcagaactatcaaggggtctattctgttcagttcagttcagctcagtcgtgtctgactctttgcaaccccatggatggcagcactccaggcctccctgtccatcaccaactcccagagtttactcaaactcatgtccattgagtcagtgatgccatccaaacatttaatcctctgtcgtccccttcagtctttcccagcatcaggatcttctcaaatgagtcagctcttcacatcagtggccaaattatttggagtttcagcttcaacatcagtccttccaatgaatattcaggactgatgtcctttaggatggttggat

SEQ ID NO: 64618 - DNA, 1578 bp, Bovine  19866880418278
  misc_feature (1)..(1): n is a, c, g, or t
nattttatactttaaaaagatgaatttaatggtaagtgaattatatctcagtaaaactctaaaaaggcacttatgtttaataaactgggaatagaagaaaaacttatgaaaaacagaaggaaattgaacatagtaaaggatttttatcttgcacatgtaaccaggtgaaagtttcgttgcattcttattaactcatgcgttaaaaaaatggaaaaaaataatagaagtaaaataaaagtatattatatctattattatgaagccttgttctagatattataaccaagatgtatattgtaaatattctgacatgatatatatcatatttaaatgctgtgaaagagaaggacatattatattcagtgaagatggtttgattgtctagtgaaagtgttcatctctcagtcatatctgactctttgtgaccccatggactttatagctcagcagtatcttcatccatggaattctccaggcaagaatactggagtgggtggccattcccctctcctccctaaccagggaatgaacctgggtctcctgcactgcagcagattctttaccatctgagccaccagggaagcctatatagaatacataaaaattttatgaaacaaatagacttgaaagaattcaaaaaagaattctggatgaaaaggattaacaaagtcaacagctttcttatatgttatcaacaaacaaatataatgaaatgaaatgtaaaagagaactcaatcaaaataacagtctaaaaaataaaaatatttagagttaaattcatgtgatattggcaaagatgaagacaccttatatggatgtcagagatgggtaattgtaggaaattgaatgaaaacaattttgtgtatgcatatatgtacatttctctaagtagagaatctaaacagtccatcaaattctcaaatgagctaaagaaacaaaaaagtttatatatcattgtccataaagcagcagtatatagaatagtgtagtaaaaattcattgataaatgggtagtatagcttgatataaattggaaatgacagataaatggaatcataaagaaaatttaaaaaatatatatttggtgtatgataaataatacataaataattgatagatgatgaatttttaaacagcatttgagaaaagagataattatttagaaaaaaatgtagtcttcttttcccataaaccaaaatttcatattaaggactttatataaaaattaaatcttaaaatattagaagaaaatataggttaatttttatgtaggtgtaggtctttaagagaggcttacctggtgggtaagtggtaaagaagacttgtcatagaagactcgggtttgatctctgggtcagaaagatcccctggagaagggaatggcaacccactctagtattcttgcctggagaattccatggacagaggagcctggctggctacagtccatggtgtcgctaaagagttggacacgacttagcaactaagcagcaacgacataattgctttactatgttgtgttagtttcttctgtacaatgaagtgagtcagctatatgtatacatatagctgagtatt

SEQ ID NO: 64619 - DNA, 1942 bp, Bovine  19866880427112
  misc_feature (1)..(1): n is a, c, g, or t
nagtgccgaagaatggatgcttttgaactgtggtgttggagaagactcttgagagtcctttggattgcaatgagatccaaccagtccatcttaaaggaaatcagtcctgaatattcattggaaagactgatgctgaagttgcaactccaacactttggccacctgatgtgaagaactgactcattataaaagaccctgatgctgagaaagatcaagggtgggaggagaaggggtcgacagaagatgagatggttggatggcatcaccaactcaatggacctgagtttgactaagctctgggagttggtgatggacagggaagcctggtgtgatgcagtctatggggtcgaaaagattcggatacaagtgactgaactgaactgaactgaactgattacagaaattatacatgcacaaataacttgtacaggttgcagtgccataaaaagacctttaacttagtaaagtcattaattttgcaactttcattcatttcttctctacaaaatttgcataccaccattagaacatgatgattccctaaagagaaaaatagaggaataaaataaggaaattttttaaaaatgctgacacagtctaatgagtttgactttagatattaagatatacttgacttgtacttttatttgcatttaggtcaaaatgttttctaatttctttttttgcttcttttctgacataccttataacagcatggtattgagtctccaaatatttagatattttctagagatataaagtttaagcaatagaaggggaaaaaaaaagatatactgaagtcagagaaggtattaacaatataaaatttttctatgactttgctaactggtctcaacagaaaaaccaatggagtaactatattagaattcactaccacagaagtttatagggaaataacaatcatgtattttatgtctttgaagagaataaatagtaatcataagtaatgatgaattcaatgacaaaatgcctgaaaagaagttgtactcttggtaattgtggggaagtcctaaaatggattatcttccacagacattaatcatcagtcatggtcatacagacatatataattttatatttaaactatatatataaattttatatttaaatttgtttatatataaataaatatatttataatatatatttataatattttagacagtaactaaggcagtcagagattggcaggagatgttccatcctgggggcttccctgggggctcaatggtaaagaatctatctaccagtgcaggagacgcagatttgatccctggattggcaagatcccctggagaagcaaatggcaacccactccagtattcttgcctgggaaatcccatggacagaagagcctggtgggctacagtccatggggtggcagtcagagaggacttagcgactaaacaacaacattacacacatggaagaatggcaatgctgacatgtcttttccctgaggatcttttctaagatgatcccagtggtatctgcttcctgctatccatgcctttgtgtaatctcctccccttgaaggtgggcttgatccagtgacaactgtcttctaacacaataaatatggtgaaagtaacagtgtcagttctgagactagatttcaaaagtctgccttccatattgctcacccttgcctgtggtcctcacaatggaagaggaaggaacctgaaggcaaggcactgatctctggtcaaatacagtgagaacttaaggtggctaacagccggatgagggagcctgggaacagatttcaccccagttgtgccttgagataactccatccctgcccctacatttgattgtagctttgcgagagaccctgagccagaagacccaattaacttgcatatgaatttctgttaaaatagatgcttttcataagaaatacttattaaattttagacag

SEQ ID NO: 64620 - DNA, 1146 bp, Bovine  19866880500246
  misc_feature (1)..(1): n is a, c, g, or t
ntttttttgtctttactatgccctaagcaaacattacagaactgcagttttattttacaataaaaatttgagtcctggctttaacagaatcattctctgtatgtgtaatcattgttagtatgtgtaaccaaatagttagtaatcattcttagtatatgtaaaattatgtgtaatttgatataaatctatcttaagttatactaaacaaaaacaaacaaagatcctgagatctggatgttttacacactggcattaagaaagtatttatcttgcttggtctcttgggagcaggcagaaaagcaatcacaggtacttgtctaggtgtctttaataatattttgacctcaatgaggaaaatacctttctttttttcctttttagtagtgtgatctgtagcaattctttagttcagaaatctgagatgaaagtctggttcttatgtactgtaatagaaagaacttagaaaatctatcttatgctctcaaacagacagtccacagataccagagttcactgtcagaaatattgctttaacctacattttatatatatcttagtactagcaaaaatgatattctgtagcagtcaggttttcagtgattgtgatcatcaataggaaggaaaatattcaggtgtattgtcaaaaatcataaaatgaggctttgggacaaatgattttataaaatgaatgaagtaatgtaacaaatcaagtgtagctataaagaaagctctgcatgagatgattgagaaacactttaaagaaggggcaaagtctctcattttatttcattattagcagcacactcgtgttttgtaatttatttggctattagccagtctttgaaggattgtaattattcatttcaaatgtgtaagtgttggaaatgcttgagtagtttacactgacattctctcagaaggcttctgatataattgcctttcctatgtttatactatacgttacatactcatttatagaagcttctttggcactggataaaatgtttgaggtcagcattttgtttctttgttttaaacatatttatttggctatgccaggcttctaactgtgtcacaaagaattttcgatctttgttgccacatgcaggatctttagttgtaccatgtgaactcttagttgtgaca

SEQ ID NO: 64621 - DNA, 1037 bp, Bovine  19866880787088
  misc_feature (1)..(1): n is a, c, g, or t
ntgagaaaactacaatttacttctattttactaatgttttaatatcattttacatctttatttacatgaaaaattggtatctcttaggcagaatgatattttaaaatacacagatgctgcaaataaaacatctcgtggctgttcaacagaaacataaggccactgaaatatattaatttttcagtacacatgtaaatgtggctaagcaaaaatttggcagaagaacaaatattctcacaaagaaaatacaacacagtaaaacataaacacaattaaatgagccaaattataccccatcaatggatgagagaggcgtgccattgactctgtctgcatggcaactatacagtcaattttctggattattagacaaaatatgcacaaaagcttttggatgattaactgtgtataatagaatcctattaatttagccaacattcattgaacacctatcatatttcatgcactatgataaccactggaactaccaagatgaaaagaggcacagtccacacacttagaagcctgacaccttaagtcttttctttactgtgtagctttagatgcattatagatcagcttacatttcttgaataccaagcaaagtctgatacaacatgattcgtcaaagttcagcaatgctcttgccttacacaagcatgtaaagacgaaattcactttacagtctacgacatttcagcaatatatagacattaaaaatatatttcattttaaaatgtcttgttcattcatttatttcgctcaaaaaatatttatcaagggcttattctgtgcaacattctgtaactggagacacagcaatgaaatatcagcatactccttgtttttcagaactgtaattgtatattattcttttcacaataacaaagctccttagagccttccatctggacagattatttctttgtttccctgctgttagagtctgcccttctcctgagaatatctacgcttcactcatctccactcaacttattggctcaatctttacttccttgtctacccaacaaggaagt

SEQ ID NO: 64622 - DNA, 1332 bp, Bovine  19866880797547
  misc_feature (1)..(1): n is a, c, g, or t
ntaggagattggtgctgttaagcgattttcttggaagaaagcatgaacataaaggaataaaagctgagatataaagataattctcctttttaatgtctccatttcaaaaaatattggtgatcttttagattttaagaaatagtgccatgtagaaaacagtcgaagtaattaaaagaggatcattacagagcagcatgagtagtttgctttattcactgatgatccaccaatttaaaaaatgctgaatagaaaagagatttaagtgtttacattctctaagctgatattattaacagctcagaattccatttatttaaatggatgcaataatcagtattaaagggatgagctgtttcatgattttcagggtttatctctttaaaagaaggatccatctgtatgttctaagattttaattatttgttccttgttaatttttaatttctatcttggataaagtcagattgactctttcaggtgtacattgtgtgttttgacaaatgcagagtgatgttcagttcagttcagttcaacagctcagtcgtgtccgactctgtgaccccattgcagcatcccaggcttccttatccatcaccaactcccagagcttgctcaaactcatgtccatcgagtcggtgatgtcattcaaccatctcatcctctttcatccccttctcttcctgccttcaatctttcccagcatcagggtcttttccaatgagtcagttcttcacatcaggtgtattgtctgtcccttggtagccaaatcatcctcccacccccacaataaaaccttgtcaactgctgaaatgttctctgtccttacgattttgcctttgctgtattatataaatgtaatcatacagaatataaacttttgaatttgggttctttcacttcaaataatgaattggagatttacctatattcctgttttttcccttttaatactgagtagtgttccattgtatagatatatcagtgatttgattattcattttcctattggaaacaaaagactctttttactttttttttttttcagttttcagtaaagctgctggaacattcacatgtagatttccatggtgagaaggtacaatcatagactttcactcaacccaggctcctttacttactgctgttgaaaatatttaacaggctaacaacagagtgtaaaggtgatcccttatatgtcaccatctcatccatcaaccacttgactatattagattatctgtccttagtgatgtacacattcatctttggtgaaatctgcatatattctgggtaggattgtctttttgcacttcggaccttaaccagtaatat

SEQ ID NO: 64623 - DNA, 1868 bp, Bovine  19866880826510
  misc_feature (1)..(1): n is a, c, g, or t
nactttcactttcaaacacaaaataattaaagcaaatttaaaaatccttttaaaagaatagaattttctttacagaagtaagtagccttaggaaatatggagctgaccttgttattttattgttgagagaaatgaaatccagtgagattcaatgagctgttgagttatatacttcagaatggaaaatttgggccccaaatctggacctggtgcatcggatgttgctctttgaactatgttgaagttttattgttcactaaggaacgattggcaacagatcgaggtgatgaatatgaatatttatctttttaccagagagtaagggaaccaaaggatctgaggtgatatctctttttgacacttactgcttgtcattggaacttgtcctttgaataaggtatggggatggcaatatatagtttaaactttctgcctcttttttcagtcaattcagatgtagtcatctgcctttcctgctacacattgggtttggtggaaaagcatgtaggtttagtatgatatcaaccaaaattctaccaaaatgcttatgaacatttaccatgactaaaatgcatattaaaaatttaaaagaatagctgctgctgctactactaagttgcttcagtcgtgtccaactctgtgcgaccccagagatggcagcccaccaggctctcccgtccctgggattctccaggcaagaacactggagtgggttgcatttccttctccaatgcatgaaagtgaaaagtgaaagtgaagtcgctcagtcgtgtctgactcttagcgaccccatggactgcagtctaccaggctcctccgtccatgggattttccaggcaagagtgctggagtgggatgccattgccttctccaaaagaatagctaagaccatcctaaaatagaatacatttgtgtttcaatatttatttttcaaactaaattagtacaatgagagacaagtaatctaatagagtcaagagataggcatacacaggtacaatgactgttgctttatgataagaaagtataactgaaaaatagtgaggaaaggatgatttatctcaatgaatagtaatgggtcaactgtatatataaaaaaagagggggaaattcttaatcactgtttgacacaatagataatacccaattcctgattatatgtctaaatatgaatgggtaaagttctcatataatccttgaagatcataatggagattgttaatattataaaataggatataagtatcactaaaataagctatgagtaatattatttcattaaaattaagaaattctgtttatcaaaagacactactaagagagtgaaaagtcaagctattgagtaggtgaatacatttgcaacataaataatgctcaaaagtattttgtccagtgtatataaaaatcttgtacatattaataaaaattagacagataatccaacagaaaaattcatgagattgagtaagctcttcacaaaaaaagatatccaaatggccaataaaaataatagaaggtgctcaacctcattattcaacaggaaaatgcaacctctatagaacatcctatacattgtaataatgactaaatattaaaataatgttaatatcaagatcttacaatgatgtggaacaattccaattctgatgtgattattaatcattaaattgttttagaaaactactaagtagtgtcttctaaagtttacataaatatatactgctactgctgctgctaagtcgcttcagtcatgtccaactctgtgcgaccccatagacggcagcccaccaggctcccccgtccgtccctggggctctccaggcaagaacactggagtgggttgccatttccttctccaatatatgaaa

SEQ ID NO: 64624 - DNA, 1772 bp, Bovine  19866880857670
  misc_feature (1)..(1): n is a, c, g, or t
nctgaggcaggaaagattttatgactcagactcctttctttctgcccttcgtcctatctcacctgaagtggaacagaatgcctcagtacattttgtgacaacttatatagcttgatgggttagtttgctcactgagtactacagttgcaataattcatacttcgtattgtcctacaaacgtcctggccctgggctccgctacatataacactttttcacatgaacttccaaggccaaatctatcttcaggtattcaaaagcaaacccgaccaaaaataattaaacaaatatacatttgggattagagggtacataggagtctaccttttcagagaaaaacattgtcttaactgcgattacagtcaagttgcaagttgttacccagtcagtgccagctgtcacattgaaaagattttattttggtcctggatcatttccattcaaataaataaatcagcaaacacattttggtgattctatttttttttttttaagtaagcatgccataataccaccaaggttgcttagcaacgatagaatagtgagatggcaggactgaaaagcccaatagaataagcagttatatttacagtcttaacagtgagaagaattgtgctggtttggtcagcctatagacctatgaaatttatagcattcattgttgaaattgtggacaagttttacaacagtatccttagtcatcatgtccagttgtattatagctgaggaataccatctgctgacttcctccatagtcattcattatattcatctcaggctttttaaagatttcagtgagcagtttaatgttagatagtgcataaaaaagattcaagtagatttcccgtatccttttcaaacagttaccgttttatgaccatttgcagaatttgctttgtatttttttgtttttgtttcatgaattctttctcagttaatttaagtggaaaacaacgcatatgttttaacagatatggttgaagtttgtgtttatgtaaaatcaagaaataaaatatcccagctcagttgaagtaacaactgttaaattaagtattaaaataatttaatagataatatgtttaattatttttgatcagaaagtgatcccttatttacagtaagaaatacacatttggggctttataagaacagaatctaaatgctctatgagagtttggattgtgggtagctaatacattcactaattcattcattaaataattattgtatgctgttatatactgaactggatactaggggaagagaaataaattagacctttgctatccagaaactcacaccatatttagagttctaattttaatatattaaagggatgctaatgtagaggtacacctaagagtttgaaaatacagagaaagtaatagcctttggagacatccgcatagacctcagggagcagctgtcattgttctagatgttgggcagaaactgggtttcacaggaagagaaagaggaaagaatctgtcattgagtgtgtttggatagacagtgtggaggtttacacagaaacaggcatttttagggatagccagtgtgacctctaaagagtaaatccattccagctggtcttgtaaagaaattcattctgaaaaaaaattaaatgaaataatcaatatcaataatagatgtaaagggcttgacttttcccaaagctttgatacaactagtaggctttccttacaacccttatttgtccctcgctaacatcaccaaatactccaaacacacaaaatgattcatacaatatg

SEQ ID NO: 64625 - DNA, 720 bp, Bovine  19866880939965
  misc_feature (1)..(1): n is a, c, g, or t
nttatttcccttacaaataaaaaaggggttgtagcaatgaagtttttattaaaccaactattttttttcaatttattttttaattggaggtaaatttctttaccatgttgtattggtttctgccatacaatggcagtgatgcaaatcagccataagtatacatatatcccctccctcttgagcttctctcccaacccccattcccacctgtccagtcatcacagagcatcaggctggactccctgccttatatagcaacttccactagctatctgttctacacgtgatagtgtatataggtcagtgctacttcctccattcatcccactctctcctccattaccaaaatgaatgaagatagagggacattgtaacttcttacatatcatgcatgttgcattctggaaaaatcgctacttactttgtaagtttatggtaaaaaaaaaaacaaaaaacctaaaatattttaattcccgagagtaacaatttttagtatattttacttttgtgttagaaagagtcctgtttttccttaggagtaatcttttacataataaaatggccttcaggaattctaccaatgtcattcacagacacaaacaagtcttctttcagaatgagtcataactgtgacattgaaaactctttggcttatataagcatatttattgtattcattaaagtaaaattccattccctttgctctcagttccatagtcc

SEQ ID NO: 64626 - DNA, 1151 bp, Bovine  19866880956557
  misc_feature (1)..(1): n is a, c, g, or t
natggatgtcttctgagattgcggctgtactctggtggaaagtcaagtctgtccaaagtgaggttgcagttgacagcccaaggggtgggaagaattgggctaggaaaggagcttgtgtggacagagcagcatccatacctgccttaccacctttatcacactggtggcaggtccagcctagccccagaagcaggtatcagaccttgttggtgaggaggggcatgaaaatctgaagtgctctatgggaccattctttggcccttctctatgccactgctgtgtatgtcggagtctttgactcttcatctttcattataatttatagtgatcaaatgttccagggagaaatgatatattgaattatctgttaacattcagtgtagaacatttcataaactgtgggtcaagaatcactagcatcttggcagattgatgtggattatgctgtttcccctttcaccatttatctatctaagctgtggactttacaaagcagacactaaagtggagatttagtaattgccacattgcctgtgatttttcagataatggaaaagggaaaagtcatagaatgtaaagtaaggaaaagctctgtgacactttgattttttaatagttttgttctgaaaatcatgggtcattaaagtttgtagttaatactagaaaagagtctggctttcattatgaaagagataatttattcacatacagaacaaggttcattgattaggagtagtatgtggtgagttagaataaactttgcttccaaaactaagttcagcatttggaaaagtttgattgatacaggagaaacaaggtattatgttttaacctaatcacttaacaggttttttttaggcaaaattgagatgtgcagacaagatgattctaaagatgagtaaatttttagctttttatattaataccaaagtaacaggagatgtctacatatagaagttgcataagtaatcgacacatttctgtgaaatttattaatgacttaagatgcagaggcatacatgtaaaattgaccaacatttatctggaagtacaaaattaatagctaatatgatctggagtagaatcaggattcagaaaaatctttcaattcagttcagttcagttcagtcgctcagtcgtgtccgactctt

SEQ ID NO: 64627 - DNA, 1009 bp, Bovine  19866881084215
  misc_feature (1)..(1): n is a, c, g, or t
nttaatgtcagtattactagtggattcttggcaggaaagacatgaatttatttactttttttaagattatttttataatcaagaagttaaaagttaatgtaatatcctagagctatcatataattttttgaagaaactaaaatctataaaaaggaggacaagcaatcaacattgcaggtaagaatatactaatgaccttaaaagtgctctatcactctatcatgcacttgaaaggaaatactcggtgcacttaaaattttagtgttagttttacttgagataatgttttggttctatatatatttgtgtatgtttatgcatgtaccttttaagaagtataggttgtacatggttttgttgaagcatccaattgttgattggatggattgtattctctgcttttagtaatgtccatatccttcccactaatttcttgaacactcctttccttttcaagtgttgaaaataataatccttgcaacagtaatatttaatgagaggtgaaaagaagcaataggaaaacagtaactgttctcacaagttgttgggatctcaatgccaaaaacttatttaatctatccaatgtgacttataacttaaaagcagaaaaattgcttttaaatatgtttttcaccctgatatgtatacatgtgtgagtgcttgagcttttgtcttctttttttatccagctatctgcatccttgtttattaaacttcaatcatatttcagttccatcagtcagaaaattcatcggcatttgtgtgtaactccctgctattaccagtgacagctttttcccagtcactacccttggggattttttaccaattactccctctctagtagaggcaattttaaaatcactagaatcttttaaaatgaaacagttggcagtttcaggcagcagtagatttgaagtggggttgtggggaggttttccaggaatgctatcaatgcctggggcaatggtctcagagattaactagatcatagctgggattctgaaca

SEQ ID NO: 64628 - DNA, 1239 bp, Bovine  19866881142940
  misc_feature (1)..(1): n is a, c, g, or t
nacacatacccacagtttttgagattttaaaatacatttacattgcctagaacttcactgactataaaatttatttaaaattgtgaagcatacaaagcttacttttaattcaggaatcttttttctttcccctccagtagctaatccacattttctaaccatgctcaacagtacaataggtccagtgtccaggccactgtagcagacagaccagctttgagtgcctgtttactagttctgattctctatgatcttagaaaagttacctatcttctcatcatcatatcaacagaacaaaacaagataaaaatatctaatttacaatcattttacatcttaagggagataatgaatggaaacatgtctgttataaaatcatcattaaacatatgtgaaatcctttatcttttggcactctttgggattttacattttaatcttgaaatttaagggcaaaattaaaagccttgccacatgtgaaaaatgcttcgggactcaggatgtaagcagatggaggaaatttggaaaagggagttaggagggtcttatctgggacttctaaatgcaatcataaagataattgtttattctgccatttcgggaaaccatatttatgtatctgatacaggttattcatattgcttccctgattggcacacgcacacatacaaccacacacacacacatatccatatacagataaaattgggagtggacaggattcaactatttgttttcagtcccactgaccagttttctgagattcctctaatttctttacagccttgagcaactgaggtagttgtattttctttcctggtttattactcatgttttatcacctgaaatacctctgggaaaaaaaacgagaggtagaaccttatttttggtagtatagtttccttccaactaaaatgaaacccattgctcaaatcccagagattgcataaacacagaaacttaatttcctgcaggcattcattcatttcagacctataacagtatagtgtaaagaagccatccagaaacttaccatgaccctcgaaaaagtcagcatgtttgatgtggaaaaagtactgccctttttatgaggtttcagttacttctactttatgctttttatttatacaattattcggtggaaagaaatggtagggaatttttaatcatggcaaaacatagtagtttttaaaagtagctttttcactgaaatggtaaggggcggatttatggggaaat

SEQ ID NO: 64629 - DNA, 1894 bp, Bovine  19866881218477
  misc_feature (1)..(1): n is a, c, g, or t
ngaataatcatagtatgtaatttatatggtctatcttcaatgtttttctaatggaattattcaaattctagtacatgcagagaatatttatcacacaaaggaaaagtctaccagtacactattcaaacttatgaggctaaattcgctatattcactttgactgttcctgggtgaagagaataatacaatgaatcatactttcctccctctatttctccttttcacgttagatggttttgtcacgaaaagctgagatattggaaaataaattcagctctttcctgtactctgtatctcagagcagcacacatacatttttctagttcttaatttttatcccttcatgctgttcctaagctgccctttcccgtgataacttatgctaaagaaaactgcattatttagtgatattactcatggctaccatttactaaggacttgatatgtgaccagagttgataccattctagattattctttgcttgtttgcccagtgtaataaaaatccattaaataatacagaatctctgtttcagggaagaatggatatgaaaccagtgaaaattcaaattttttctatgataagcaccacagtaaaacaatacaatgaaatagggtagctattttattcctaaaatatagattatgattccactcactcttctgttattctgctgaaatacttttaaatggtgttataccaagacataaactctgctgagaatcatcagacatgtgtatactataaagaagtcacacacttcttgtttccataacctttatggctaagctcttttaatcaagcctataacatctattctctgttttatattgctaattgtcacaaacgtggtataacactcttacccatcagtttagggtttagaaattcatatgggaactctgggaaaatttagtgtcacagaattcattgatgaatttcaattttacacaatacacgtttaaaagtttacttatgagtaagtttgtgcctagcaataattagtctgtttgactgaatgataactgaattagctaattatttgaatatattaaactgccaagcttgagcatatattgatacaaataaatcattcttaagttttaaaatttatttaaatcaatgtctgcattatattgcttcccaggtggcgttagtggtaaagaacccaactgccaatgcaaaaaacgtaagagaagcctgccaatgcagagatgtggcttcgattcctggtttggaaagatcccctgggagaggtcatggcaacccactccagttttcttgcctggagaatcccatggactgaggaacctggtgggctacagtccacagggtcgcaaagaggcagacatgattgaagtgccttagcagcagaagcagttgcattaatttagttgacaactttgaaagacatagactatattgtaaaaatatttcgaactttattaagcaaacaatggaataaacttaaattctacctttaaataaatatattcattgcttactaaaaaataaacagttttgttaattagactcctctagttggtaaagaatccacctgcaacgcaggagaccctggttcgattcctaggtcgggaagatccactggagaagggataggctacccattccagtattcttgggctttccttgttgctcagctggttaagaatctgcctgcagtgcgagaggcctgggtttgattcctgggttgggaaggctacccactccagtattctggcctggagaatactgtattcttcatggactgtatagagaattttatggactatagagcccatggatctcaaggagtcgtacacaactgagcaacttgacattctttctttcaccctgaaactcaattcagttttacgtagacttgttatacca

SEQ ID NO: 64630 - DNA, 2411 bp, Bovine  19866881445037
  misc_feature (1)..(1): n is a, c, g, or t
ntgcactggcaggctgattctttaccactagtgccacctgggaagcccatcaaaggcacaatatatttgtcaaaattctagataaatatcttatttctctggaagtacaggctaatccactactactgtgacacatttgttcagtcacttttctggtaagaagttgacttagtgactgtttactgtttcattctgcactgatacatcctcctttcctcctctccttttcatttgtgtgtgtataatacagtagagcataatttcggtttactaggaagtacaatgagcttcccaggggaaggtaatatattactttgacaaacatataaataagtgatgtaattatttgtcatgagctggtgaactcaccagttgagtgttagaaacaatttgaatagcataaaatttttgaatacagttcttgtattcatgattgcagctaaataaatgaatggattctgagtttggcatgttaccggaaacttaaattggggtagaattacctagttaaacttaatcattatgtcagtatttttatgactaatgacaattcagattctgaaacttagcatactttcagagaagttgcaatggctcatcaatctctgttgtgaagtattaattagtgattcgtagccatgatgtattgcctcttgtgaagaactgaggagtcagggggagagtgtgtagaataatttattctctttaaaaaatcaagtaaagaaagaatcaatatgggcagaatctaaaattagtattagaaaaataaaccagtttttctttttacattttatggagtgccttaaatttaacaaatgttaaaaatgaagtgtcagtttaccaaagtaagtacctaacctcatatcagagtagtttaaagtgactgaaacctgagaaatattcatccctgatggagatcttgtgaataaatgcaacttttttttttttaagatatgtatgggcccaacctcgtccaggtcatagccactgatcaaacatattacagttaataaaataatgtttcttttcggagacattatatttaaaggtaaagtgttctgtgaactttgcttattcactccaggtttttcaaaattcaatattaattgagatattgtctttggtgacaaagacaagaatgactaaatttcagctccaatgtcatctgctctagaaattattttttgatgtttcagtcatgttctaatatacctatcatacaaataatagttgactataattgcgtatttttttgttagctttttttttttttaattttactgaaatatagttatttttaaattgttaatattttccttgggacagggtggttttttacatctttgaatttctaggacatggcacagggcagtctagtaaaacttatttgaatgaattaaagcctgatagaagaaaatcacaataaaatatgtcattgttagatagagccttgtgcaaaatgctataggagctcaggaaggaaggttgcagcctcggtgggactggggtggggttggggtggagaaacatcataaagaaggttgaagttctggtttagtaagtggagttctcttgtgcaggagaagaggggaggaaggcaaatgtagagaagcattttataagcatgaattagttgtgtgtggctgaggattgagcgtgaggagagtgaaagaaagggaagatagttctggataagttgcctaggaacaaatagttaaagggtttttgtataccttgataaaaagtttaggctttattaaaaaaaaaagttgaaggataattgttgaagagatttaaggaacagttggtattatcatactgttaaggaatactgatttgctggagtatttaggacagaaaatattaattccttagaaggttgtttcaagtctcagtcaagaaatttggacagtttgaacttcagagagcctacaggaccagagacagcatattcatgaagttggttaagagattaactgagcggctatgactaaccaatttcaagttatgtttaaatttgtttaatttttgaccataggatcatagagaagatcaggcattcaagatgaaatgtaagggaaaagtttgtaaaatagttgatgctgatgaaataattaaataaaggaatactttgtatattcatcttttcttctgacatgaagagaaggttgatacaagagtatcataaattgtagagtttcttttcctttgctaagaaggcaatatatcacaaagataatgtgtgattattttgcattggatcaagttttattattttaaatcagatctctctttgaataaaatgtaattattttgatcattacacatttctgggccattatggacttcttgtacattttcaaaatactataaacaccaggactaagctcctgggggcagttttctcaaca

SEQ ID NO: 64631 - DNA, 1106 bp, Bovine  19866881503503
  misc_feature (1)..(1): n is a, c, g, or t
ncacatgctttgaccacctgttaatttgagggggaaaagggagtgggagtggagagaagagtcacaggagcaagaagaagaaagaaaaagcctgagaagtactgcagtagagtctacattgataatggatgtggactgagataaatgtgatacttattttcataaaactttatctttttaaaactataaacaaatatgaactagaagttctttctcatttttatccatatttcagttgtttctcatttcccactttattcttaaaataatatccatgttcttagcaatattaagtatgaggtaaggggacccgttcaagatcctttctatgatgctgattgttgctattgttcagtcactcagacttgtccaactctttgcaacctaatggactgcagcatgccaggcttccctctctttactgtctcttgaagattgctcaaactcatgtccattgagttgatgattccattcaacaatctaatcctctgttgcctcattttccatctgccctcaatatttccaagcatcagggtcttttccaatgagtgagcccttcacatcgggtggttaaagtattggagcttcaactccagcatcagtacttccaatgaatattcacatttgatttcttttaggattgattggtttgatttccttgcagtccaagagactttcaagagtcttctcccaataccacaattcaacagcatcaattctttggcacttagccttctttatggtccaactctcacatctgtaatgactactggaaaaaccatagcttgactatatgtgccgatatcctataataaaggctaggatacagcatctactattacatattctctccttttcatttttttattcttcttccttttaaatatttattgttaaaatgcctctaagttatttttataacttgccacattgagtaagtctgcttaagatgaggcttgaaaggtgtagttattcttaatagttctcttgagccttattggtaaagtcagtattgactttcttttctgatgatgtaatgagagcttaatgaaatagaacaataatgataaaatatctaaattctccactatgtcagaagcagtcag

SEQ ID NO: 64632 - DNA, 1092 bp, Bovine  19866881799007
  misc_feature (1)..(1): n is a, c, g, or t
nttattgtttcaccagtagttttatgcatttattctttttgtttgtttgtttttagtttatattgtatctcctgcctcgtcttctcactagagccagctgttgagtcagcagtgtgtaggcaactcaaggaggacatgattactgagatttcttttatgttctcctccagggcagccacctgctttgtcattgcaaaaaaaaaaatgactcatgtggcagcctgacaaatacctggttgctcagcatagccttctgtgagacacacttgtagctcggctttaaaggagggttaaaatgaagattaagaaatcattgaaatatccctgcagagcccagctaaaaggcaaagagagaccttcacattataaataaaacattagcagagtcagagcagggcgttgggtttcttttatgattattatacctaaatgatgcaggaaaacaaagtaacaagataaaaatatatgtcaaagcagtatctgattccctgacgtactctctgacccaacagtcaaaatatttcagtcatgtttctttgtagtttaccctttgaaccagaaaagtttcagttaaatctgtgtcaaaaatcctagtttagttagcacacacagcgtaattaacctgaaacaaatcctcccttctcttctgtattaaaggctcacagagctggtttctctaccacctagaaatgatactggaaattgtcccatttaactatttctgggtaacacactacctccagactcaaataatttaagactcaaaataattattttatttgcttacgatttgtgggtgggaattcaggaatactctgattgggtggtttgtctctgatcctgggcactgacagctggctatctggggctggagaacacaattccataatgaccccatcattcagatgtctggtgccccaattttcattggtgtcttgttttctccacaaagcatatcctgggtctatccatgtggctgtgcttctcaccatacggtggtctcaggataggtggccctcttacccactggtttgctttctccagagtgagtgctgcaataagtctagctgaaagatacacacatgctcggtt

SEQ ID NO: 64633 - DNA, 1012 bp, Bovine  19866881900610
  misc_feature (1)..(1): n is a, c, g, or t
nacctattctttcttgttcattttataatcccgagacagcaaacatggtcacttgagaataattaaaatttcaagttacttaatcccatgaggataaacatttttatcatctttatctcttaattgctaacaaatgttcttgaaaaaagcacaatgtgacacaactaatttgcatatactgaaaaggtagcgagtttttaaataagtcattattttgagcaaaacaaattactggcatgggttgtactcatgttgtctacacaaatacataacaaaattgttaagttttgtcagtgaatctgttcatgcctgtgatcaaaagctgtagcaacttgtcagactacttctctatttccactcccaaacaatgactttaatatctcttttggaaagactagaattaattaacttcataagtcaaccaggatccttattgctccattaaaaggttacatgaaccctttatcttatgtttgtaacttttttaaaaaagggactttgaagaaaaggacattaattactaaacacaacaaaactcaaagaagaaacttgtaaagaaaaaaaaaaaaactcttaatagaaatgctttgtcatgcactgactagtagttttgataaggattacctgtaatgagaaatttctacatagtctgaaatttaaatttatttgctgtttgattgcagctgtataaattcctccaagccccccacaacccccatgccctgccatccatgcctgcctagaatgcctgtgttacattctgaaagagtgtcactgaaattcttcaccttctactaatagataaacttatattgggagctggtgattttttttagcacagaaagtgaccctggaaatctattttctgatttacacataattaatttgcaccttaatgatgagtaacacagcatggcatctgctattttcagcagtatactggattagtctcatgactatcattaaatatttaataatgttatatgtttatatcaataaataaaaatttaat

SEQ ID NO: 64634 - DNA, 1821 bp, Bovine  19866881935272
  misc_feature (1)..(1): n is a, c, g, or t
nctattgttcccactcaaacttctcacttttcttctataaagtcccaaatgtataaaacatagcatttcttatacttttgtaccccacagtaggtaattaggtatgcatcctaaacaagtgttagaggttgaaagcaactgatacaatttggtaaaaccgtatctgcatatctataaaagggccttttattatagaactttattttcaaagcaggaataaggcattgttgttccaactgtgtctccagagtattttaattcttctatggttcttttattttcctttctggtttcctttgtaattgtctgcctcctctctggtggaggccaccagagactgaattagactgtttcattttgaaggggatccacactcaatttttaatagcagcttcttcagttcttgctagactgccagggatcttctcaggctattacaataccaccagcagtgacacatagcatgctctgcaggaatcagattttcctgctcagacaaatcagatttttctcccactttatgtaaaattttatgtttttctatgccatctttaaatatatgaaaacatattcatgaaataatgtcatgtgtaagcagaaaacgatagcctaatttgggctttaagtattcatctcacataacacagcaattttcagcagtcatctttgaatgacacatcgaggagtctcctttgtcagagatctttcattagtaaatactattccattgccacctgaactgtttcttgcacagtttgcatagacattgagtctctcttatgcattaatgaaaaacaagcatgagctattcataaagattaaccactggcagcatcaaatgcaaaaacaattttttcccctgctgttgatgtctataagagggtctgctatgggccaaaacacagaattgttcttaatgttgacaacaatgtagtgaactgacttctgaagaaacgggcaatgaaaagaagactcagagaagaaaatgatgaaacaacagctggtttctctgtggatgaaatctgtctcctccaagatactttttccgcccacagacatatatattattgtcattactgtaggctcataaaaaacttagcatccaagaggcttatgccattacatataacaaactacataaaaactgtgcacttctgtttactaccaacaagcagttaggggataaaatttatttaaaaaatgccattgaaaaatcatacattatgtggataggcatataatgaaagctgtatacatcgctacgtagaaaactgcactacattactgaaaacaatttaagaaggtataaatagttgatgttcctgcattgaagacacaattgtgtaaagatatcaagtcctcttaaactgacctttagataaatataactttcaactcaattttagaattttttaaaagaaactagcaagtttaatttaaaatgtatatgcaaaatgcaataggcctagactagacaataagatagtgaagaaaaagaacaacacttgaaaacttttctaaccagatatcaagatttcttataaaattttcactaaagcactgttgtaatgtcacaaggctatacagagccataatcagcatggaatgttcagaaactgactcacccatttatgaacactgggtttctgacaaaattggtcccataaaacagagggagaatgacagtcatttcaataaattaaactgagttaaacagtaattaaaaaaaataatcttgattcactcctcccataatccacaaaaacatcacctgcaggtggattatagattgatagatgacaggtaaaacactaaagactt

SEQ ID NO: 64635 - DNA, 768 bp, Bovine  19866882223868
  misc_feature (1)..(1): n is a, c, g, or t
nagctgcatgctgggttcaattatttgactgtatctagatgtgagtcaagaaaataaaaccatatattttctgggagtatgttctcaattttataagccctccaatctcctcctatttttaagaacaaagaagaggcacgaagggaggtgtaagagcatttgacccaaatatcagatgtgtagagacctgtacctacgttttagaaagtaaaaagggtgatgttttaccgtaaacacagaagtcctgaaatacatcaatgctgcaaaatcagagtgagatggcagggccaaggtgacaggaaaactacacggtcttaacaaacttgtaagaggacattatctttcttttaaaatgctcagtttaaattagttcctcataaccgctgtagaaaaagcaggaaataatctttactcttcaaacaacttgataaaatctttaatctgtaggtaagcagagtgtgcaggtgtgtcaggaactccacttaaaagaagtagacaagaagcagagctacacagcccatctagacggggaaaaaaaaaaaatacctaaaactttgctttgtggagctgaataatacaacgagttgttataccaatcaaattacataagaaatagccaaatgtctgttttgtgctgtgtggagacagacactaacaatcaaagctagggagttttaatgaggagacttaattaagacacacatcatcttacgaaaacatgagtctttaattctgagaaaaatcactgccaaactcagttcagctggc

SEQ ID NO: 64636 - DNA, 1062 bp, Bovine  19866880418677
  misc_feature (1)..(1): n is a, c, g, or t
ntcacaagtgcaggctgtggtgccagtctgtgtcatgtgctggggcctctgtcttccccaggttggtcacatgagagggtttgctctgtttgcagctgttttccaactctgccaagcccaggctgggaccataggcagtgaagagaggggtgggggtttttttctttttctttcccatagcatttgagtagctgtttggcagaatggaattgctaagcccatggacatagcacagttacccacagttctaacagagtggtacagagagctcaaatccattgtggaatgaggcagatatgaataaataaatgtggtgatattacccattccatggattgggggccatttgctgccccatgggtaaaataacattacctatttcacagggaaaaggaatgtgcctcacagatgagggtagcaggggaattaatcagagtgggattactcataaatcctgcatacatggtggctttggaggcgcagagaggctacctgtgtgctgtctaccattcgtctgtgataggctttgctttgacagttatgcagggcacacctgccactaacaacccactctcatgccttaaatttctgtagctagaatcaccttttaggttaagacattttctcctggaagcccctgttaacagggcactttgtttcctgggagccaggggtaatcatgtaggtctgtggacacttcttgggcttctttcagatgaacttttcagttctggcttcttgttggattttactgaggattgaaggtcctaagatctagaccagtggttcttaaacttgactgcacctaagaatcgcctgaggagcttttaaaaatcctgatgccaagccataccctcagaccattcaatcagagcctctggaggagggaccagacagtgctgtgatttttaagttccctcccctaaaatggtcccaaagtgtgaataagcaggaaaatcagtgatttacaccatttaaaaaaaattgaagtatagttgatatacagtgttgtattagtttcaggtgtacagcaaagtgatgcagtattttctttttcacatt

SEQ ID NO: 64637 - DNA, 1198 bp, Bovine  19866880478637
  misc_feature (1)..(1): n is a, c, g, or t
nggccctgggaaggatggcccatggtaggggctcccattcagagataagttgaaacctccccctacctgaagcagtggacagtaagaactgaaggcagcagcggggagggggccaacaggaagtgggagagcagggccaggacgggggtgagctaaaggaggcactcacctgaggtccaaaatttaagaaggtgctcccaaacccaatgatcaagataaattatatttaaatcaaaatgaatgcaaaaatatcctggataaaatatcacaactgtaaacaaagataggatcctataaagctggaattagagtgaggcaagtgaggtcaagtcctgctatccatggttagatcctgtcttttttttttttttttttggctctttggcctgtggagtcttagttctgcaaccagggattgaacccaggccccacgcagtggaagcttggaatcccaatcactggactgccagggaagtcactggattctgtctttactaaaatttttattttgttcactgtggatgtttttacattccttttgatttttaaaagtcactgctttaagatattttctgtggtaaaggcctcactgcctcaccctagtctggggcctggaagggaggagggaccctattaaaaacatcatcatgtgacaagtcactaggagacatgggttcactaaactgcagggattcctctcagctctgatagagccagattcagcttttacaagattctgcagcatgaagattgctcttggggagcagagatgccaggcacatacatgggccccctacacttgggggtgacagtgactcggaggtggcccccatctcttggcctctctcaggctggctgctaaggggagtggaggggaggggagcggagggggcgggcggggaagagggcggcagttttgcacggctgggagcaggaatggcagattagctgtaattgcctgaagctgagaggctgttgataaatgttactaataatcaaccttcagatctgacaccagctcaggctgggattactgttttgaatggaaatcgaacccaaaccagtaattaccccggtgagcgatgccagtctcactctggagcctgttctaggcagggaaaaggcacctgcatgtcagtgtcagccctttagatagggtattctgcaagtagccctttcccaagagcacaagccttgt

SEQ ID NO: 64638 - DNA, 746 bp, Bovine  19866880483400
  misc_feature (1)..(1): n is a, c, g, or t
nacctatcggcaaggcttctgaagcattaaggaatgtgggatgtaaagggcatgtattagcactgacaacacttggctgcagagaggtttttgcgcttcacaggccaaaacatgactctaagtcataaatatatacaagccacactgcatagacagtggcaggaaaacaactgtctttctgaagaacagtgagactgtctattggaattgttagttcataaaaatccatttacaataagtcatttaaactgcacccgaaatacagattgagaggattttcatagccttctctatcagcaaacagcctcaggacccttttccttgtttgttattaaaaggtgactcagagcagaaagaggaagaaagcgcctgagaaacctctgccaaaataaagaaatcaagtactggtaaactgaaatcctctatagccttcttgtttttaaccaatggttgactcatcgctatttacatatacatgatggtaaattatttctctgtctgtaaaggaaagatagctggagcatgagccttagtgtgaattcctttatgagtgtttagacaaaatttatgaattataaggctcccttttacagaggaactaatcttaatgaatatggctgctttaagtctttcatttttatgttcctaagtgattaatgaatcattgaaacattcctggagctgatgcatggtgtgctaacattttgattataatcccaaaatggcaccttatccttgctgcctaa

SEQ ID NO: 64639 - DNA, 1383 bp, Bovine  19866880501697
  misc_feature (1)..(1): n is a, c, g, or t
nacttccgggtcacgaggatggagtagtgcagtgggttgtgaatagcagtgtaacggtcataggacatggcggccaagatgaagcagttgttggttcctaagccaaagaagaaaaacatctgtgtggcacactcaggaatggaaatggacttactgtctgatagcaagtccaccaacatgcgagggatgactaccacagtggtacaggtttctgaaaaggagaggccacagaggaaaaagtacatgggagtgtgaaggttgtgactgagcttgacggccagcattacggatgtgtttgcggctaggatggtcacatgggagaagaaaaccatcacaaagaggagatcctgcaggtctgagaaactggaaaatccccacagaaggaaggtgctcactgtggtatgattgcccattctcttggtgtatgtagcaactctcctccaaaggtacagaggttcttggggttaagactctgataagactgctgaaagtactgatgcccttaatcatagacactgacaagacaactcttaacaaaaaagcctgagaaatggaagttaaatgtagttggcttaattctacgttaggacttagagtgatgaagaaaaagattctcataggagagtatatataaattccatagagtaggcccaaatatatattctaggagctccctaatttatcacccctttccagcttctacaatcagaatcttcaggaatgagagaaatatggaaaatgtttattttctcacttacaagagtatgaggaataaaggatataaaatgttttatgcgtggtctaattatagctcggcatagagaagtacttaacaatgttgactgaatcaatattaaagagaagtaaggaaaaacttttgaatagcttccaaacattcttggaaaataattctatccttagaggtgctctggaggaggcagtggctgcttggctgactattatgtcagtgaatggacttaagaatgagtggactttcaaatttatgccagtttgaaatgtatgctaattttctgtacataactatgagctgaagcagagttgttcaataattgtctgtcattcaggcaaatcatggaagcaaaatgatcatggagactattctaatcctggatggctcatctggttcatgatgttctgatcaattcttgagctttcaggaaaacttccaggataaagctaactgatgtactggtggacagggcttctttgcagcatagttcttataagaactcaactatctcacgttgtctttatcagttgttaaaatatctactatgtgtttgagattacagcatgaaggtaacatacagatgttccaaataatacggagcttggtttcaggcactgtttagggaatgaaag

SEQ ID NO: 64640 - DNA, 1686 bp, Bovine  19866880523686
  misc_feature (1)..(1): n is a, c, g, or t
ntccgtccccgctttcccccagaagacctttaacaatgtctcaggagcaatttttggtggtcacaactagagggaacgttgcaaaacaattttgcagccaggatgccgcaaaatatcctacaatgtgcagaacagcctgaacacacagaacgttccagttcagaacatcagtagtgccaaggttgagaagccctgattcagacaagcctgccctgtcatgaatgttcaggaacctgtaagtcttttaatgggtgctgttttctaggctctgagaaaagactctcctttcttattttgcagcgaaattctgtggagagagactggcttcatcagttcttgttggctccaacgctataaggctgagcttcatctctgataacacagataatgccgttgggttcaatctcacctataaagctgttaaaccaaactaccttcctggtaaaactgtttactcttatcatacactatgctgaccttttgcagaagttgaggccccataggaattagatgatgggtagggaaaccaccaaggcccactgagctccacagcaaagaagagccctaggtcagtgagacacagggtacgggggctcttcgtgcagtcttgcaaatgcatgcttgtttcccacccacatgagccaagacagcttgatgacttctccagaaccagtgcacagacctcccccttcttgatggctctgcctgaagagccagttcaggcatctttcatgggggacacaagggtgagaacaaagaggtcccctctgtccacggtgatgccactgcttggaccttctcctttgtattgcagattctggctgcgactccttaacgatcctgtttgaagaaggcctcatacagagtcctcactatcctgaagactacagcaacatggccagctgcaactgggtctttcaagcccccaaacattatctagttaaggtacccttacttggctgtggatctccacagaatcgcttacatggacaccatgagggcagaggcttttatctgatgcatttcctgctgtattccttgtacctagaacctagcacctggcacacaaatctcttgataaatacttggtatcagaccggcgtattctgtcctgcaactacccacacttgccactagatggcaactgtgcgctttcagttcagttcagtcgctcagtcgtctccgactctttgccacctcataaactgcagcacagctgcttctctgtccatcaccaactcccggagctgactcaaacttgtgttcatcggtgatgccatccaattatctcgtcctctgtcacccccttctcctcttgccttcaatctttcccatcatcaggatcttttcaaatgtcagttcttcacaccaggtgaccagagtattgaagtttcagcttcagcatcagtccttctaaagaatattcaggactgatttccattaggattgactcgttggatctccttgcagtccaagggactctcaagagtcttctccaacaccacagttcaaaagcatcaattctttggcgctcagctttcttcacagtccaactctcacatccatacatgatcacgggaaaaaccatagccttgattagaccgacctttgttggcaaagtaatgtctctgcttttgaatatgctatctaggtggtcatagtttttcttcaaaggagcaagcgtct

SEQ ID NO: 64641 - DNA, 1127 bp, Bovine  19866880582989
  misc_feature (1)..(1): n is a, c, g, or t
nttcccagactggaaagtaggctttctcagttcagggtctaggctcttagcctcagctccactgctgactctgacgtttgggaaagagtggggtgggcaggaccaggcattgttcttcctggagcaatagtgaaaggagggctctgggccagaagcagacgaactccatttgcaggatggaaagggaatgttattgctgaattctgcagggagcggaaccagcagagccaggcagtggggggggcctcaaataccaggtggagttctgggtggtggccacagtggcttccagcagcggagccacagagcataatgtggagtgacccggggctgaatggggatgccattctggggaggcggaccggcccttgagatcactaggagcggagagagtgctccacagctgggcttagcctgctctccaaactagaggcatgggtgggcccaggagccggtggccttggcactttggaaaagtccgatctgaggggcaggctggccgggggtaggtggcaagagttgctgaggacttgggtgtggcctggcagaccactctgtggggtgtgggaagagctgaatgacctctggcagtcccttctggtcacccggactgtctggcttttccccagattaaagagctgagggttagtgtctggcagccgaatgagtcagactgggagccagccttcttcctgcattggcccgcccagggattcagcctgaccagcgtagggatagggtaagggttgggctcatctcccgtcaaatatctccctgcacaccccaagatttaggggaacactcgagctgagtgaattagtttattttattgggtcccatgtgtatgtgtgtgtgtgtgtgtgtgtgtctgagcgtgagcctgcacgcacacgcaggggcaaacaccatccattgtaaaatatcagtgttttcatgggtgagtagtaattactgggtaatgctttaaaacctttcctgaaggagcgcaaagctgtttttttctaaagtcaggagtacattaaaaggattaccatgtagatttgatttttagataacactaaaatggatcccaaatggacttcagcaaaaggatgctatctccttaatggaaagtgcatggcctgagg

SEQ ID NO: 64642 - DNA, 711 bp, Bovine  19866880631534
  misc_feature (1)..(1): n is a, c, g, or t
ncccagagtgggccagactcatcttacatgtaacagttatgatgagagggtgttgagttttttcctgaccttgactctgagcccaggatggaataccagttaaatgttgaaatatcctctgtacgaatgatactacgttcctcctcctccagtaactgtttccttttttattttcttttgtgtttttccaggactcagaaaaaactctcctgtagtctcgaagacttgagaagtgaatctgtggacaaggtcagtccgtcagtctatccataaagatgactgagttatttctttgaggtcagcacagtgccgcgacatgcaggccaggcgctgtccctacctgatggaggcttttatcaagttgttgaggaggcaggaattttatgaacattttgagaaaactggtcagctatggcccaaggcatcctaaaggcacggtgagtcagaacacactgcctggagttgatgagaaaagatgttgaggtgggcatgggtaggtttggagaaatggtttggggagcaggaggcggtaaggtcagaggcgggagtcagatggagccagagttcttaaatcctggccctatttccccagggcacttggaatgttgcagaggttttgaatgaggatataatgtggataaagatgcccctgggagtgggttatggaataaagtagaagattggagaggaagcttcttaaagagtctaaaa

SEQ ID NO: 64643 - DNA, 3622 bp, Bovine  19866880636512
  misc_feature (1)..(1): n is a, c, g, or t
natttaggagctgaatactgaagggaagactgaagggttgcaccaacatgaacccaggcctcctgcctcctccttcccaggaggcacccaggctgggctgcagagaggcaggcctagttcccagaacttgcccggcaggtggtcagctgtgttctgtcccaggcaggggccactccactgccctccttctctgcccacaaaagtagatggaataggccacagacaggtagcaagtcctgagtgtcatgtctagcttgaagcccagagacccagggcccacgactcacatagcagacagcagccagctcctgacgcaaggttccactttccaaagtagaggctgatgctttctgagggttgactccattgtcatacacggtgaacttggtgcccatgaggttggacctgaaggacagacacaaccattgtaaggtcgtgcatcctctgtccctgggcagggagtagctcagaggctatcctagggagggaagactcgaggggacctttgtgacctttgtgggcagacagcagcggacctggggtacactgttcacagaatcatctcagaaggcgcttcatggacagaaggcctcgacttgctccgagtttaatcaaagggcatctcagctgagctcagggaaatcggagttccacagaaggtctccctggaggaactggagtggcccccctcatggaaggtgagccaccacaggggcacctggcaagactgcagaggggactcagcaccccatggagggtggagacgatccgctctgtcccgtcagcctgggagttatggtccagccccatctccagctctaagcttgagttatgctcccgaatctgccacacttctcagcacgccctccctcacctgaggcctagctcagagccttcgccccacccctaggttgcttcctcttccctcaagggctcactcctgccccttggcaccaaccatgagaccaaggcggctcttccacggtggcctacatcatccctgacattgtggagtttgacttgtcccccctagtgggcctgcgccccttctacctgggagcagcttagggtaggatgagtgaggctcatcttcaaatctggctgtaagctagcacagatctgagcctgtggttgatctgatggacagagagaaccctgggagaggatccaatgcttgacctccttcaggggcagcagcagccctctacagagcctgccccagcctgccccacccccgctggcctcctgggggcgtgctggtaccgcagtttcccgatgtagctgtcccctcctctagacaagtctgtagggtccacggagatgaggtaatttggaagttttactcttctttctcttccttcccgccaggaggaacaccttggggagtggagcaaagtcatgcatgttccaggcccagcctccagtccacatgcaatcccaggaccactcacacaagcgatcccctcgcttcagctcttgaacatacacatgtgcacacatatgcaccaatggggacacaggcttctgtctctttgggggaactggcaggtcagtgctggagctgaggcttccagtcccactccagcccccaggacttcaagcccacaggatgaaactgcacgtccaagccaacctcaccttcttcccgtcctcacggtccaggtgcaggaagtaggtggggtacatgccccggtccatgcccttcttgtcccgtgtgatgcggcacttgatggtgatcccctggggggccggcctcagggcaaactcttcgagatcctggacctcaacatccaccgacggctcgggggctgtggggctgggggccgaggctgcctcctacgaaggagagaggaggagcctaagacccaggcagggaccccgagctgctgacgatgatggtctggaatccaaagctgcccccatatggtggtggtgggagacaacgctggcaccctgggatgtgggcacagagatcttgcccctgggccagcacacggcttcctagctgttccttcagctcagcaccccagggtagggatggagggaacaggcaggctctcagaagccatgctgtccaactccagctcccccgccctctaacttgactgaagactgggaggacagaagagccccaggggaaaaaactcttgacaggcacctcggcccagccctcggtccaggaaagccaactccgcctcacttcacttcgttcccctcccacctgggtggcactgctgtctgccctcctgctgagcaggagctcctcactcaccctggtggacttcctgctcgtggcggagctggggcgggtgttgctattcagctgggaggagctggagctgttctcgtcctcctcctccctcctcctcctcctcctcctcctcgaagctcatgctgctggagatgcctgggccgggcagaggagtgggaggggacgagtggtcacacaggcacacccagtcactcacccgtccactggctccaagtcacccattcacacaacacacacggacacacacacgcagagtggcacgtacacacgtacatccacgcactcccacgcacacattcagatgcacactaggatgctctctctctggtgcatatgtgagctggggctggtcactgtccccgggtgcagccccctgcccagcctcagctgtcagaccctatctgacagccagggtgccctgtctcctgggtagcaaggcctgaactgagctggccctgcctgggagcctccgtctctggcctcaagtctactggaggccttggctggcaaaacctataaaatctcgagtaaggcccaactcctcactcagtctgatgctcagggcccaccaatcctctccaaagaaagtgaaagtcgctcagttgtgtctaactctttgcgaccccatggctcctctgtccacggggattctccaggtaagaagactggagtgagtggccattcccttctccaggggatctttctgacccaggaatcgaaccagggtttccagcactgcaggtggattctttaccaactgagctaccagggcggcccatcctctccaaaacctgccctgtctacatgccttcacatcttcaccccagctcaacagcccttcctccaggaagctgtccctcatgcaacatctcagaacgtgtgcactgcgggctctccctacaccacctccctggggcagagctcactctctgggcagcaggtctcctgggacggtatgccttgcctctcagcctcctggccctgctccctctagctcaacagagtggggacattttgtaagaaaagaactttctcagagggacaaaagggaaaggaaatctgtccccacacctgggcctccctgtgggcaggagatggggatggggacccagggctgggttgtgggctcactggttccttgagccacacttctctccctcaacgcagccttctcaggggtccctgcccaagctgctcactggtctccaagtgtgcccccaaccagggcctgggaggagctgaaacagacacaggagggccatgctccctgagaaaggtgcaccggagaacctggggctgagctttggggggtgtctctggacccccacggggctcacccttcctctgcat

SEQ ID NO: 64644 - DNA, 1927 bp, Bovine  19866880752691
  misc_feature (1)..(1): n is a, c, g, or t
ncgtgcacaggcttctcattgtggtcgcgtctcgttgcagagcacaggctctaggctctcaggcttcagtagttacagcagtagttgcaacacatgggcatgggattctctaggcaacaatactagaatgggtttccagtcccttctccaggggatcttcccaacccaggaatcgaacctggatctctggcattgcaggcagactctttactgttggagccacagggaagcctgccttgaaaagtagattcttaaccactggaccatcagggaaatcctcatcctcagacttttgaagtggaattttattgctcaatctagtgtgtcacatatatcctaagaccctttcaacattaaccctcacccaatttttttatcataacttttttcttccttctctgatttgagtagatggagctaccactgcacacgcatgcacacacacatacacaggcgtgtagcacttagcagttacaaatgagcttcttgatgagacttcatttactttcccttttctttctcatcagccttagttctcaagtcatctactgacaactgtgagctcttcaagagaagggtgtgtattggtcatctttgtgtttctagtgcctggtgctcagtaaatgcttgtgggacaaattaagaataaatgtactgaatgtaaacttggagtaaccaaccccaaaagtcctcttcatcaactggaataagtttttccttgcagcagttccctaacttgccccttcatctgaaaagccatgacaacggtcttcttatcttttgaacaatgccacacttatagcccttgcttcttttttctgatgaatccctcttagtaacagcctgtatgtcacacatgtcaccattcaccgccttcccttcaaggttgacttgacagtggatcttaacactttcctatgaactctggactgttcagaattcctttctgaacagagattcctttttagaagggcaccataatggagttggcattcaaggtgtcataatttgctgtcccgggcacaggacctaagagcacacatttggatccatacacatatgatggcagctcctggctctgctatttacaacctttgttgttgtttggcttttctcagactcagttacctttgtaagaaaaaaaaaaaagcaatttaacatctatcacagagggtcaaggcaaggactgaacgagataaggtttgcaaatctcttagggcaaagcagggtgcttgagtgctcaataaatagtaattaatacccaaatggatgtttccgttttctgtctttggccccagtcacctggctgggtttgatccctgggttgggaagatcccctgaagaaggaaatagcaacccactccaatattcttgcctggagattccatggacagaggagcctggcaggctccagttgcaaagtgttggacacgactgagcaactaacacagcatacacacacctggctggaaatgcagttaccttcacactttctttaacatgctgattcttcaagaggcaaaggaaagtgaagacagccctccttggggaaattgaaaagggaagactcagattttaagcgggcaggggatggtgtttcttcatatatttgcagatctgtgttaagtagtaaataagaagcaaaatcccaagatttttatgctttttaaataaaattttaaagtacaagtttaacagttttaagtacaataagattgaatcatgtaatgagtcacttcaattttcaacaggcttcctatttcaaagcccttagatacttcctgtaatcaaaacccattttccaattcacaggcagatattatctaatgatccactcaatcttttcatgttcttaatttggggtcagtctcaatggcctgactcacatcagctgtcatttttgtgatcgaaatgtcacttcacatta

SEQ ID NO: 64645 - DNA, 697 bp, Bovine  19866880765754
  misc_feature (1)..(1): n is a, c, g, or t
nttttacttttctgtggaccaaatcaaatcaatcattttttctgtgattttgctcctttggtggaactctcctgttctgacatcagtatccctgcagctgtcccctcatttacggctggctccatcgttgtgatcacagtgactgtcatagctgtatcctacacctacatcctcatcaccgtcctgaggatgcactccaccaaggggcgccacaaagccttctccacctgcacgtcccacctcacagcagtcactctgttctacgggaccatcacgttcatttacgtgatgcccaagtccagctactcaactgaccagaacaaggtggtgtctgtgttctacatggtggtgatccccatgttgaaccccctcatctacagcctcaggaacaatgagattaagggggctctgaagagagagctttgttaaaaaacttctcacttcctgctctgtgcatccatcctcctaagttttttaatcattcttaggatcattactctgaactcttttttgggtagattgcctatcttcactggagaaggcaatggcaacccattccagtactcttgcctgggaaatcccatggacggaggagcctggtaggctgcaatccatgggtcacgaagagtctgacacgactgagtgacttcactttcacttttcactttcatgcattggagaaggaaatggcaaccca

SEQ ID NO: 64646 - DNA, 1630 bp, Bovine  19866880880024
  misc_feature (1)..(1): n is a, c, g, or t
ntgggtagctttttgttgtcccgatcgcctcagaccatcaactagaaccctggaggtgggactctggcatctgtagaggatttcagtatgtatataaaactgaagccctttgtgttaatctatcttctccaaagaatgctttattgttcaagataaagtaattgagagattgcccccaaagagaaactctattagggcttgaacaggaggtgagttgctgttttctgagaggcactttagggatcaacatcttgccttctgttattgtcacttttgttttgttaaaccaggtatgagggtatgcattttcttatttgttgcgtctgatagtcctgtttttgtgtgtttgcctctgtgattgtagtttttccgtagccgtcagttggctgtagagaatgtgtgtggcatgtggaattgagtcttctgggtaattgttacctttgctagtgctaggcctaagaagtttcaccattttggaccattttctgagcctatgtattgatgtaaattgtaaagaaatagaaattaaagtcttttatgtatgtacacattacatgcaaaaatggacacagatacacgtgcactcatacacctttacacacacgtaaaatatttgaaaagtaagaaaaaatcccaaggctttaggggcagggagtggcccacagaatggaagggacttgtccaaggcctcactgatagaaaatgaatgaaaatctcagtcttcccacatacttctggcctgacttatcctacatttgtaaatatgtgtgtgtgtgtgtgtgtgtgtatgtgtgtgtgtgttggagtgtattcaggatggagaggcatgacttagcatttgtttagagattgggggtcttgctctacttctgtccattttctctcctgaagtttttgactgtgacctttcctaggcaactcttaattggatttgtagaagccagaaactggtgagcacacatcagagtgggggtaacggggccgtctcctagctccccagagccacggacttgtttgtggattgtgatccacaattccctctaacctgcactttcagaaagcaaaccagcaatctaaaagtaattgtttccttctgtgtggatttctcattccaaagactgccatggcaagtaggaagttggctttggagagagtagaggaacctggaattagacgacaggcctgcagtgtaaccgtggatatggtggctctacagcccacattttccagcaagagtcctgatttcaaggattttattctgttggctttataaacaattcaaatgccctggaaattccaccatgagccatattttctaaaatgtttcttaactgatgaaagaagcacagaaatcctttgttagactctgttgccccagttttggtttagaaaatatatcaccatctatgcaaagaaggcttttttccccttcttttttaatggtggggtttagaaaggcaaacacagtcctatttgggacataccaatttagaaaaagctgacccagtatcccagatctctgtggaaatcaggcattcttcctcttagctattcatccaagcatatgtacagacattcagccagttcccctcacagtctgctgggcagggggcacgataactgtgtcagc

SEQ ID NO: 64647 - DNA, 1927 bp, Bovine  19866880929038
  misc_feature (1)..(1): n is a, c, g, or t
ntttcaaaatgcatataagcaagaagaagctcattttactatttggaataatctttttggaacagagtaaatctgcaactctctctctccccaaaggtaagttctaggaagtctatcactatctttgaagaaataacctttgctggcagtgggtattacagtttcactccgtattcctttgggagaacaggagaagcaaatatattctggagatctaattagatttcatgtaattaatttggacttctctcctgcaatcatcattggagaaggaaatggcaacccactccagtgttattgcctggagaatcccagggacaggggagcctggtgggctgccgtctatggggtcgcacagagtcagacatgactgaagcaacttagcagcagcagcagcagcctgcaatcatcatattaaagtgaatagaaaatttatggaatacaaaatacaacttggataagttgcactgatctggaaaagactggaattattcatttatttgaacacattctacaatcccatctcctttaatggaacaaattcgagaaatgagcataaatttggaagcatttgtaatcttttaaaaaattatactttttactgtagtttggtcttccctggtggctcagctggtaaagaatccatctgcaatgcaggagacctgggttcaatccctggattgggaagatcccttggagaagggaaaggctacccactccagtattttggcctggagaattccacggagcgtatagtccatagagtcacaaagagtcagacacaactgagcaactttcacttactgtactttatacaatatactgctataaatagaaggtgtgaagcctgtttactgcagtatattttgtatataaatgatgtttttttcttcaagtaacataagctaagaacagttcttggcaatcttcttcatagtcagatttgtacttcaagaatcatcgtattttttttatttttccttcaatgggttcaggaaatactaaatgttatgtatacaaaggtatttatgattcacttaactgaaacagctagaaaataagcttttgattcagcattatgcctgctctggattcagaatcaaaagacagggttacatccgtgctttgtcattaattaactgtgcatctctttgattcttcattttcccatctgtactgtggggataatagtgcttgatttatagtcagagaatggaaattaaatgagaagctatttgaaaaagttttggatattttaacatattgatctaaatagctatgctttcacagatattttctcaagaaaagtcatttgtccatccttccaatttttctaagtgtccactgtatgctaggaatgtgctaagtgttggaaatacagagatgaataaaacagatttttttcattttcatagtaaatgaggatacaggaaaagaattttctatcccactatttcatggtgaaaactataaaaagggagaggaaagggttttacacaggagagacacttaagacagtttgaggaaatcaaggaagatgcctcaattgaagtgatctccaagctgaagaatagggattagaggattcaactaggtaaagaagtggggcaaatgtgaggcagggcattcaggccttccaagagaacatgtggagaagaatgacctgcagtagggacagaaggtggatcttccctgattaccaagcagaatgataagtcttgggaggttcacttatactgttctctctacttttggagagattttcacttttccatcacaaaaaggtaaaagcataaacaaccaagtagaaataggagcaaagatataaaacttcaatacatggaaaaataaatttttccatgtaaataaatttgaaaaatttgatgtcaccgataattaggcaaactaaaaattaacaatgcatttt

SEQ ID NO: 64648 - DNA, 1574 bp, Bovine  19866880951269
  misc_feature (1)..(1): n is a, c, g, or t
natcagactccccaggacctcattgcccacatgtcctcctcctgggccgggtggcgtcctgtctggagctcctaccatccactgggatcccaccatggcctctctctcctgcttggattttccagattttgtgtgggagacaaattcttcatgaagaacaacatgatcttgtgtcagatggaatatgaggaggggcagcttaatggcacctttgactcccacgttcagtaacgcccagcacctggcctccaggcccgtctgtctgtccatccacccgcctgcccatccgcctggccggccagccgctctcctgccgatgagaactcctccgtcctcgatgggagggacggccctccctccgccgctgcccgtctgtgtgtgacccctcctggggccaggctgggcctgtacagtctgtcttctgtatataaatgggaacatttattttatgagaaatgtaatgcgattttattactggcgtggattaaacttatgaatgtttccggggaggttactctgcattgatcacatgactacagacctgggggaccctcccctcagcttgggagtaaaacaaggccctccctcagttcttggcagggaggagggccctagaacaggacgtgggggctctagtgtgtgctgttgtggggcaagggagttccaggtgggctttacggagaaaagctggaggggaagggacaacccccagtaccccccaaccagaagtgggagctaaactgtccactccccatcctctggcaaccatataccctggtccccaaatgaaaacttccctttcctgggatcctgtgttacatcccccctacactgctcagtcagggacccagctctgatctacctccgtggtaagaccccaaatcccaggctccctacgatgggagcgcaatcctgaaacctctcttcatcttcagggggatgaacagcatttgctgtctcttccttacagcctgggtcttggcattctgctcctctgggtgagagagaaaatcctatttctctgtaactcaacccacgcatgctggaggttttcattcattcagtcggcaaaccttaatccgctctgtctcagccctgtgcttcaagtaccagacatgaggatgaatcatggataggacacagtccgtgcccttgaggacgagggggaaagccaagaaaacaaacagatcacatcaaggtgaggacaaatgccacagggagacctgggacaggcccgtttcctccagcagacacaggactgtttgggatgactccagagagtcagacagacaagtcagcaccacacagacagatacgtgtgctgacaagaagaagagatggacacacacgtaggtgggtgtgtcagcagagataggtagggacagccaggtagctggcaggtattcagactggaagatagccagacaaccagtgaccgagtgaggccatgactgtagccacagtgccaagcacatggcctggaactgaaaaggtatcactgagcagtattaaagagagagcctccttggatccaaagccgaaacagagaaggccgaatggatgggctcctccaa

SEQ ID NO: 64649 - DNA, 1012 bp, Bovine  19866881004995
  misc_feature (1)..(1): n is a, c, g, or t
nctagagaaaagccgacagagcaacaaagacccagcacagccaaagaaatacataaataaataaaattctttttaaaaaagtttaaggcaaattgtagtatcacccattcaaccaattaattgagcaacatctgggcatcagtctagtggatttgaaagaataaccacaatggaatgtaataagtgacacagaagcacagagcgctctgaggagcctgtaaggggccaaatggcttagaatcaaaaggggactgcattcgtgctaacctggtggagatctacctctaaggccctaaatcttcatatctgaaaagtagatcttcacaatatgcaggttctatgtgaaaaagctgaacaattgcttatactgcaaatcacagtaaatcccacaagtaatttaaagccattttgtactatttctacctgctctatgtcttccagtatttcttgctcggaagagtttcctatatacctcagaactaagagctatctaatctccaaatttttgtctttgccctccccagtttccacttgtgggcagagtccagtgaagtcacagcctttgaattacctgaacattttcagtcgcatcgttgggggaaggcaagtggcaaagggttcctacccttggcaggtgagttcaggaaaccttctctggtgggattatgagctgcctcaattggatctctcagaatcccatgctactcatcagtatgctccgttctgcttagttcatcaccagagatctcatgagtgtgtacaaggatccaagagcctcctgatgttcgttagttgacttctagaaaagatgtgttcagaatagttacaagcactattctctgactccaaaatttagaaatgccatcccaaactttcagtccctaagacaaaaatcccgcttcaaatttgtaatttaaaaaataattttctgattcaataaacatatttaaaatatacctatcttgttatcgttaaagatgatgagggaagtcaaaggtgtcatatccagggt

SEQ ID NO: 64650 - DNA, 1355 bp, Bovine  19866881041605
  misc_feature (1)..(1): n is a, c, g, or t
ntgaggatttagcctctatttttaatagcaagacttgaactccctagggaccattcactatcctttcatttattcaaaaaatattccttggcagctatgggctgaatgctgtgtgaggctctgtggatatgctctcaggtaagacagtcacagtccctgccaccaaggaaggatgacagtctattcaaagggactttaaaaaacacagcactggttatagtaaatgctatgagagaaacaacaggaatgatgattctgagaaaagtaggggcacctagttgaggtaggatggccaggttaggtctttccgagagctaacacttaagttgagatccaaaggacgagaaatgatggatttgtttcgtcactctggcccttgagtgtgtatcaggcggggaaccattccatgaccaaatgaattgctaaagcctcttctgtggcgatgacacaaagacaagtccttgcactgaagggggagtaaacactccagaggaagaggcccagagagctccagtggtgacggcacatctgaggaaagcctccagaggtgaggcctcgaacaggggaagagttcacggccatggctcaacaagagagctgggctttacagacccatgcgtgcacacacgaacatacacacatgtatgtgcacaccacgtgcctgctcacacagctgttcacatacccagagactcacaagcccacttataagagagaacccaggctgaggggcgactgcactctgtcacggccgagccagttacctttttctgcgtggtcaccgtgcagagctgctgacctggagagctggctgtgcagacgctcaatttctgcatccttcagggccacctgctcttgcagctgggctacctcagcctggaagagaaaaaggcatccaaccagctcagagggaccaccagaccataagaaagcaattccagtcagagtccagagcccacgggtcctaggacccgttaggaagttaacaggtcagagcaaagtaggaagaggcaagcagtgagaggtgtttaccgccctccccacaaggtggcgctctggggaataaacatgctcttcctggccattctggacactggccctcccctctccacttccccaccctgctctgaccatcctagctgctctttctcctgcttcttcctccctgactggactgaactctttccctcccctgccttctgtagtccacacaccactgaggcctgaggaggtgcgagcgtgtgtaattggagggctgcccttggtccaaagatgaattctctttctggacatggtcttcttcctcccaagatactcctgcgacagcatgtacgtacaccactgaataagtacgt

SEQ ID NO: 64651 - DNA, 3365 bp, Bovine  19866881049382
  misc_feature (1)..(1): n is a, c, g, or t
nccttcctggttctgtttgctcccttctggtctctgatactttgggcagggctgtgcccatcaggacactgactcagggaagtgtcaggagatccacctctgcttcctggagactcagctcagttacctgcttttgattttgatgcctgggaattttgcctaaatggaatctctcaaaggcagagtaaagccatgtctgttcaggctggtttgggggaaaaaaaatacactagggttactgcctatgtcatagctgttgctcagactcctaacaaaactttagagccatccaccaatcaatcccccatgttcatgatctggtgatagacccttcataaaactgggacagacccatcagccttctttgttcttcacgttgaatccctgtacaatcgtaacatagccacctccatactacagagcacctatctggcacaaaggtcagctctaaggatcacagccctgcattttacagaccaggaaaccgagattcaaagtgcttgagtagtgttgcccaatggtcaggtaacagcagatagcggagccaaggtcatacccacgtttatctaactctgaaattcgtgtgtcgtcccaagtccccagcctttgctggggaagaattgatcccctccggaaatttcctctgttatgtaaggaatctcagactccttaggtattgagataaatatgacagctttattttagtctttttttttttttttggcatgtagcttcagaggacaatgggcttcccatgtggctcagtggtaaagaatgtcacctgccaagcaggaggcacaggttcagtccctgagttggaaagatacgctagagaaggaaatggcaactgactctagtattcttcctgggcaatcccatggacagaaggagcctggcagggctacagtccatcgggtcgcaaagagtcagacatgactgagcgactaagcaacggcaaatagaggacagtacttgggtcaggaggcaggtttcagtggctacatcaggggggtagggagacagtttcttgcttcaggaaacgtttgagacgttcgaaggctgtgtcaaatgggggttgttttataagtagagattggactcctagccttcagggagagcaggagtgtttacgacggccaaggaggcagaccactgagaacccagggcctgggcactctgtctccctttgaggtgttctagaggttccacccagcttttcctttctgtgtgcgcagaacgtagcctgggccccacatgaaatcgcctcaggtgccagtgttgctgtttacatggtaatctgttttgccctgtgacaggaccgtcggatagaggagcttacggggctgttaaaccagtaccgaagggtgaatgagatcgtgatggcaacccaaggtaagagcagcggggagcttaccatcttctccccaaggtattccatctccactgtgttaaatgccgggcagtcctgccagaagagtcttcattttcatttggaaaaatgctctgcaggaagatggagctggttagactgccctggatggtgggaaactggcagctcttgatttccagaaattttgtcaaatggcagacagttcagtacttccagggactaaactttccagaccatcaagagaagaaagccttcaacttgaaccactgggaatccccaccctcaggagatctgtgcatctgcctggcatactttttagaggcagtgagtgtagccaaacctggatccgaaggcaatttagtaccctcactgggaattagagcctatccacctcctggagagtctaaaagcatccctagcagtggccaggacactcggggagccttctttgagtttctgggtgcttgggttcccataggaagtcacagggcagggagagctgtttgtgtttcatacttgctgcccaggcagcatccgtgttgtgtgggcaccctggggcagatgcccgatggctgccttgttggtcacgctgttgacccggggctcccattacagatcccgagaaagcagctgtttcacaggagagggctgctatgagggtgctcaggaacctctccattcgggctgagctgctgctccctcttggggaagagccaacccctagtttgggttgtggctgccggttgtcacccagggccactgccaagccctgcacgcatgtcacaggctaatttcctctaatccttctggatcttgggttaggtgagggcctgaatgcctgtggccaaggaatgagaagattggagaggaataattggggggtggggacttctcttggttcccccagcttgagctttgaccttgaaacggcctcctggaagcccttgcttagatctgaatcacacttttaatgtcccttaatgtttttctttatccctcttaatgaaggagagactgtgttagaattttgtggtacaattataggtttctaaacaagccatgtcgtggtaatgatctgcattaatgcttccagggccttcagaaagaactctctccatcaatgaggaagacctggagggaggtttcaggaactggaacactgcgaataaaggccccgaagacctatttaaatcagaggtactgtgtttccattaatgatgtggggtttcagcaggccccgggagcttgccctgaacctgggggaggatcaggaacctgccaggtataaatcttgacaggtaaaaaaaattaaaccagtggagtcaccgcagaggctttggggagacactgagggtggaaggagccagggcataggcctgtgttcctgttggggagaacagcagagtggatactagacttctgaggatgggaattttctcttttctaagctttgttttggccatgctgggtcttggttgctgtgagggcttttctctagttgcagccagcgtgggctgctctctagctgtggggtgcggacttctcttgtcgcggggcacaggctctagagcgcatgggcttcagtagttgcggttcccgggctcgagagcacaggctcagtagttgtggtgcacaggcttcgttgctccgtggcatgtgcagtcttcccagaccagggatagaacccatgtcttctgcattgacaggcagattctttaccactgagccaccagggaagccccaacttttctttttcaattggtttccttgtttatttttgcctttactctctggaatttgagcatagaccaaaggggtatttttatttaccactgcctctccaggatctgcagtgatgcctgatacccagttgtattcaacaaatatttcttaatgaatgcatcttgcacatttggagggataatgaacttttgaagtgatacattcctgtttcatagacaacctctcttccctg

SEQ ID NO: 64652 - DNA, 666 bp, Bovine  19866881121915
  misc_feature (1)..(1): n is a, c, g, or t
ncagcaaaagaccaccccatagtgttattgtcaggatttaatgacttggtctttgaagagcccctagattagcacctggcatatagctaatgctatgtaggcattcactgaaggagctgtggctaagaggttacacttttcacaacaagcctgtgaaggctatgtttcagttcccattttacagttgaaataaatcaggctcagagaaactcaatgacttgcttaaggacacacagcccatgactgacagactgtgtctaagtttgagcttgtgtaagcctggaatccttgctcagggcccagcctactgttctggtatccccaggtgcttgagagacccagtgggagccctcattgtcagcaaagccaggggacaggcatatcaaccaactcccgagtccccacaggctccttcctgagtgctgtgtcagtttctctgaagcctgctctcttagcagaagttagacactgtcatctgtgcatcttccttctggcccgggcccacctgctgaactacaggggtagagggcaaggtgggcccccaagtcgaggcaactcccctgccccccacagccccccacaggcgcctgagccctctgcacccttccctctgcaggctctttggcaccacaggaaactgcgctgcttgcagcaagctgattccag

SEQ ID NO: 64653 - DNA, 3006 bp, Bovine  19866881132130
  misc_feature (1)..(1): n is a, c, g, or t
ncagattactttccagaagaatggtataaatttttagtcctaccagtgataaaaaaaactcccatcttctcgcatcctcaccagcactacagtagtgtgtcaagaatctcaccaatgcagtctgatagttcccaggtttaacttactgtggacagtatgctggatgaactggagcttagctacccaaggtcctcacagtctctttggtcaaaggcagaggctggggaggtccacttctagttagctcctagccactgaatgcttaagagtgaagtctgttttctggcatgtttctgccttctccctacaccaagaacaaagcttatgttggaatttcatgactatctgccttggtttatgatggggaagcctgctgaagaaaatcaaacagtgactctcataactacttgagtagcccatatcagccaacgtactgattatgcaagaacttaaaacataagcaagaaacaaaaactcactggtcctacgaggaagtccgcagttcaaaatgggaaccaaactaagcaaactatgtaactgcaactgctaagtcgcttcaatcgtgcccgactctgtgcgaccccatagacggcagcccaccaggctcccccgtccctgggattctccaggcaagaacactggagtgggttgccatttcctcctccaatgcatgaaagtgaaaagtgaaagtcaagtcgctcagtcgtgtccgactcttagcaaccccatgggactgcagcctaccaggctcctccgtccatgggattttccaggcaagaatactggagtggagtgccattgccttctccgaaaccatgtaaagagccccttaaaaaagtcaatgcaggaaacaggagttaagatcagtcagcttttaactgacatttccagtaatattcaactggttattatgtataaaaccaatcaggcttcagtataaaaaaaggagcaaacagaatataagaaagagctgtcagaaactgaaaatcctaattgcaaaaaaaaaaaaaaattgccctgaataaggaagaaaagagtaggttgaaatagacatgactgagaaccaaattaatatattattagaagttcaaggtgaagaattctcctaggacaaagataaatatgacaaagaaatggaaattatgagaaaaaagataagctgcacggaagacctatccaagatccaatcttagaattactacaattctacagtgagagggcacagtagattaaatgggagcaataatcaaagaaattataagaaaatattcttgagttgaaaaaaagtcccaagtcttcagatggataaatgctaggtaaaaatactttgaaaaatccatacattaatacatagtcagatatatgctgatgaacttgtacaaattcaaacttttaaatataaaaagaatacgaatttccagacagaaaacgatactagctaaccaaaaacaggatgcccattgagaaaaagaataagactgggataagagttatcattttcaacatcaaatgaaagtagagaatgaagcaatgttttcagacttataagggaaacttataaggcaaaaaatgatcatataattttatatccatccaaaaaattacttgtatcaagatgaaaaatggttaagtccaatacttagaaagcatacccttctattttgggggagctgggggagggccttaaggaagtattctgacatacaaaaattaatcaaaagtttaaattaaagaaagaagatactgtatacaagaaagtggtaaaagatgaaatctgtaagaattatcaatgtaaaataattattaataatgtggttagaaatttaatgacattgttaaattctcagaaaaggctaatatctttaaaagctacacaaatcatttggagcttaaactctatataatttcaaaaaaacctaagtagtaggtagaaaataaataagaataattttaccttatttgggaacatgttatataatgaagatttgcaatttggaagaaaataaataattccatttttcatttcattgattactactgagaatgaaataatttttcttctgttttgtgagccagttgaatttttttcttttgtgcaccgcatagctaggtggatatcagtgtttcctaaattagttgtagaactttttatatattaaagatatcagcttctttgctgattaccagtcatatttgttacagatatttttccaatttagtgttggttctgaaaacttttcaaccttgtctgatctacagaaagtaaaaattttatgtataccatataagttttatgttatactatcctctcccttataatttcttgcattgttttttaattagttttttaaattttgtgttaattgtagattcatgtgtagttataagaaatacagaaaccccatgtactctctatctagttttttctagtgataacaccttacaaaactatacactataatgtcacaaccaggatgttaatactgatatagtcagtatacaggaacatttctatcaccacaaggatcccttatattgccctttaatggccacatctactccctcctgcccctaattccctccttaacctctggcaagtttcatttctataattttgccatttcaagactgttatataaatagaatcacattacataataaccttttacaattaggtttttttttaattcaacataatctggaaattcatccaaactgctgcatttatcagtagtccattcctttttattgctacaatctttcccagccaacagagtctttcaaatgagttggctcttcacatcacctggccaaagtatcagagcttcagcttcagcatcagtcctttcaatgaatattcaggattgatttcctttagaattgactgatttgatctccttgcagtccaaagtgaaagtgaagtcactcagtcatgtccaactctttgcgaccccatggactatagcctaccagctcctctgttccatgggattttccaggcaagaa

SEQ ID NO: 64654 - DNA, 1499 bp, Bovine  19866881155927
  misc_feature (1)..(1): n is a, c, g, or t
ncttttaaggcatatccacagactgtcactctggctgctttacagctgtctgactcaatgaaacttatgaaatactgaaagggcactcactaattttcctgtgggtgtttccaggtgtggcagtagagcacttccgatcctctgcagtacttttcccccttgagagctgagaagtgaaggaggtacagcacatcaacagcagctcagaacctcaaagtcacggaacccctcatattaaattaaaaaaaacaaaaaggttgggagaaatcaaatcaagcagcaacgttagagaaacacctcaaaaaacaaaagccaacagaaggttcccaagtaaaaaattactgaggcacaagaaaacactctcttcacaagtcatgtgctttgcccatgctcactgaagactcaacctaggctgccagtagaattcctaggcaggagaaaagtgacctcgtactcgagttaggaggtcaaaaagaatctgcttcctctgcttgcagcgctaaggcctgtggcctgcctagacatggaacttaattaggagtctactttcaaaaggacccaaatcatgtctcctcagaactaggaaatatcaggcttagtttcaggatgtggcagttctgtttcaggagaaccactactattaggatttccctggtggctcagatggtaaagggcccacctgcgatgcaggagacccgggttcaatccctgggtcaggaagatcccctggagaaggaaatggcaacccatttcagtattctggcctggagaattccatggacagaggaacctggcagactatagtccatggagtcatagagtcgacacaactgagtgaattactccaactgacattaaaaatagcactcctggtaaaaggaggaaaaagtggtgttggcacagtcactatttggcctcagtgattacctggaaatcacaatgccaacccttatgataaagttcttcttagaacttctttatgcctttacagcttgcaaagatgcccagtcaaaaaaccaggtagggcagcaagagggtaggctttgaactttattgctcaatggattaggcattagaaggatccaggttcaagccctgcttctacatttttagttgtgaattctggggcaaattatttgggttctgagtgaagattttctcatctatgaaactgagataacagctatcttaagtatcttctaaagaagaggcaaaatttaaagagacggtagatttgaaaaagggctctgaaatacaaagggttttaatgctgacaatgattctcattatgatgataacagattttcactgatgtaatacaatcaggatgattccacttaccttaaacagaatgtacagtatatataaaaaaattccaaaaccatagatgggaataatttgccccatcaggcctcttccaccacttcctgctccagcgcctccacctgatcccttggcctttgcaaaggcttctgcgaggtgagacctctggaaacgag

SEQ ID NO: 64655 - DNA, 1167 bp, Bovine  19866881235912
  misc_feature (1)..(1): n is a, c, g, or t
ntccgtgggtcgcaaagagtcggacacgactgagcgacttcactttcactttcacataatgctactgtgcatttctttctttctttttttaccccaaatcaaacagataatcttaatttcttatacaacagacagtaacatcaacttttttttttttaacacaaatctcaggtcatttgaaaggccaattagatccaaggaagaaagacaataaacagttgaattaatcaataggcactataacaccacctaaaacctactaccgtggtggtagtgggctaagggagattaagctacaaataatctcatgttaatgttacagattatatagcaggagtttgagcttgctttccagaagactatggtacaatcacatggcaccaagggatatttggccggggaaagaagttcaggccaaatgaaaaggaaaagggacaaaagagaatccaagtgacagaatccaagcaaagggtgatggatcatgctttttcgtgcacatgcattttatttctctgagaatctaaacagtgagcttaagtcggggaaggaagtaatgtacttttttatatctttatctccagggcccttagtttgcactcaatacatgtttgttgattaagtgaatgaacgtgtggtttgggatctgaaagttttgctattttaaggttaatatttcaatcattttagagttcctctccatagacagcactgcttttcaaaagagcaagttcactggaattgtgaggcagactgcaggctgattactagggctgtgcaatgaagggcggatgaggaaacggcatcaaaccgatccttttcaaaggaggcaatgaaagccaggagaggggcgacccaggtgcgcctgtcctgcggagggagacaagacaggtttgaagaggtttacaggctgaacggaggggaccagtaaagagggaaagatgaagattgatggggtcagtgggaggtgagacccaggagggagggaaggaggggtcccaggggaattagcctgaggcaggagggacacctgttcctttgaatctttgaacacagggctgtcagagatgcaggaaggttttaagcagaggagagaggaggaaggcaggaagcaagacttcagggagatgagagcagcctggctactgaagtttctcttccaggcctcac

SEQ ID NO: 64656 - DNA, 1037 bp, Bovine  19866881259226
  misc_feature (1)..(1): n is a, c, g, or t
ntaatgggcattttaaaaaaactaccacatttacttgtcattggttctcttttacaaacgaagacactaaaaagctcagtgagggagctggacggaacatgcagtccagtttcaaagccgatgctgccatgtgaaaatgagaagggcttttgatggactattgcattagaagagaaaaccaagatgaagggtagttctgcactttgagttttgggcacagaagtgagaaaagtaattgagatcaaggcaacctgtgaagctgctgcagagcagagactatgggcatcagggggaggggaagccagcctgcctgctctctgtgttccagggatcacgcctatgctgcagctcatccgctgcatcgccaggaagcccagtgacaagaccgtgatgtcccttatcttcgccaaccaggtcagttctgctaaatcagccctgagcagggaaataatatcccactgttgtggcccttccctgctcaccgagctcatgctgatctgtgcctgtggctgtggaagggcttactgggctcaaggagggctgctggcagccagagaaactgagtctaggcactaagctttccttctttaatacatagttctgtgcttttccccaatataaaatcatagatgcctttagtggaaatttcgggaaatacagaagcatataaataatttacttcattttcttgtctttgtcctatacgtgctgtatagtcacaattagtttttcatttttttccactcaacattacctcacaggcattttcttctcagtctatatcaagttgtaccatcatttactaaatctccttttccaggctattctcagttttcatggttatacatgatacagtgatgaataactgtgcctaagcttgatcacagttggattattttcttaaacagaatcctagacgtgagattgttaggacaatgattgtgacacgttttaaggtccaggactcgtgtgcagcaaatctctgagcctgcaacagatcttctggcttgctcactttccctagtgggggctacagc

SEQ ID NO: 64657 - DNA, 3484 bp, Bovine  19866881267505
  misc_feature (1)..(1): n is a, c, g, or t
ncaggcctacccaagtcttcgagggcccatattcccaagattgaccaagctggattaagtgtccgctcttggtccactttgctagaggtcaaggtcatggaaatgcaacctggtcccattccagcaggagtgttgaaaagtagacttcctgagaaaggtccgccccttctgagggaaatggacacaagtgacctcacctgattcccagaagattttgaagtgaggaagtcagaggctttagcactctgggccagctgttgctcatagtagatttaggaaagaggagagattccccagaaagaggaggggttgagtggaagaaaccaagcaggagatcaagtttccatcatggagtctgagcggtgtgtagggctttgggtcccggtaaggattagacccgcagagaaggaaacagagaccaggaaaacaaaaaaacaaaaaaaacccacaatgctaggcacaaaatgggaaggcccagggaaagttgccgctctctctccttcctcctcccaagctggcgcctggtgaggaaagcataaaggccctggtgatgggggagagcagtgtgcttgcatctgactgggcttgttgtcctgcttgtctttggccagcagatgctgttgtcactgcctgtgctgatggaaccccctcaaagctgatgaggccccactgcacctcccgactgccctgaggtctctgaggcctgtcagcacctcatttgatgccaggctcaagaggtcttccgtgcagccctggtggtacagggtcgctttccgcacttgctggatgcccgccccccaacagaaatcttgttggccaatttgtcatctccttttcacatcctgggagcattcagggacgtgcaggaactgcaggagactcaggagttacgtggccatttctaccttcttcctctagcttcatgttggctcaggggccataggtgccttcagctccctcaacccacctgaaacttgaggcttcaagcttgaggggtgaatctgtacctcacatcaagtaccctccatctctcctaacaggctctctgcttcctctttctgactagtagaaacttcctttatatcagagcgttgtttcctttaacctataacatgttcagatctccaaggtttcctctcaacattgggattccaatgtgtctcttttctcttgacaaggcctagctttagagactccattttggaggggttgtctgatcattgacctcatgctgtttgtcctcagtttgcaggacatgtagcattgatgcctttgaatgtaacaacatagtttacagagaaccgaaatactgtccctgttacacaggcattgaattagtatctgtggaatgaatgaatgaatgagacataatgaaagcagttgtgttcctttagttctaaagttcaacagtttctcagtccaaagtagaagtcagttcagagtaaaatataaaaggtattaagactgaatttacagtgagctcttcaaatggagatggtccttattaagctccaagctctgattaccttttctttatttaggagaagaatgtgagaagagctcatttctgcacccccaaccctgtcacttggttcccatgaactgccctctgatggtagtgactgtatttcgagtgcacttgggaaatgttcataacaataatttaggcaccttagtaaattatgaaggtcccccctcatgcgtgatatgggtggtcaggttctgaagaactttgtatcttctttcataagagacagaggagcagagaccacagatgtccctgtggcaaatggcagagtgctgcaccccacataagaattgatcaggaagggtgacaaggacatcagtctgcaagttgacttttctcaccagggaaccattttagcagcaattttacatcaggcaatgattagctcggcctacctgtgaaaattttaaaaaaagaggaaagtagtgggaaggtactttttggacaaaataaaggccttatgattgagattttttttttttttttcaaaaactaaattttttattgggggatttaatatgccaatatccataaacacctgcaaagcccctgaagcaacactgattgcaaagaacatagaaatgtacttcatgttgggatctgaaaaacatgtaacaaacttgttagaatctgtgccagttgatgtaagtggccagaatgcagtttggaccaggaggcatggttagtgttaatggggccttgtgtttccagctgtggagggaatggtcaacaaacaaagcaaagagcattcagtgtttccaagcaagtcctctttcctatgtagaattatctgatttagggggggaaaaatggatgctaagcattttctcatctttaactagtatacaaaatctatgactcttccagtggtctgtagagataggaatcatataaaccatggaagcattaaggtaagaactagaggtatgaataccttgggaaataccaaatgcaaaagtagaagtcaggagatacctagagtaacaggcaagtttggccttggagtacaaaatgaagcagggcaaaggctaacagagttttgccatgagaacgcacggtcatagcaaacaccctcttttaacaacataagagacaactacacatggacatcaccaggtggaaatactgcccctgttatataggcattgaattagtatctgaggaatgaatgaaaaaatgaatgaatgagacataatgaaaggtccgtctagtcaaagctatggtttttccagtagtcatgtgtggatgtgagagttgaaccataaggaagattgagtggtgaacaactgatgcttttgaattgtggtgctggagaagagtcttgagagtcccttggactgcaaggagatcaaaccagtcaatcctaaaggaaatcaaccctgaatattcattggaaggactgatgctgaatctgaagcttcagtactttggccacctgacacaaagagccaactcattagaaaagaccctgatgctgggaaagattgaaggcaggaggagaagatgatgagatggttggatcacatcaccaacttgatggacatgagtttgagtaagctccaggagatggtgaaggacagggatgcctggtgtgctgcagtccatggggtcacaagagttggacagaacttagcgactgaacaacaacaacaatatacagaggtttcctaggtggcgctagtggtaaagaacccgcctgctggagattcaggagacataagacacagggggtttcgatccctgggtagggaagatcccctggaggagggcatggcaacccattccagtactcttgcttggaaaatcccatgggcagaggagcctggtaggctgcagtccatgcagttgtgaagagttggacatgattgagcgacttcactttcgcttttcactttcatgcttttggagaaggaaatggcaacccactccagtgttcttgctggagaatcccacgga

SEQ ID NO: 64658 - DNA, 1077 bp, Bovine  19866881276687
  misc_feature (1)..(1): n is a, c, g, or t
ntgattttatccttggccctgtgccctgtacttcattgtccgtgtttaagtatcatagccaatcaggccactgccatggatatcatgtatccttcctggtgcttgcacacctgtcaccttataaaacatcatagaaattagtatgaacacaagacaacctcccttctttctcttccttctttgctccatcagagattcgatccactgagtaatttttgatctatcataattacagatgggaccactcagggcagaggtctgactctccatgttagaagtaacagatggtttacctgtgatgaacatcaaattacacatgatgaggacttaaggttgcaagagtaaagatttcagagtccagggtgctttattctgtgggccttgagcaggttagtggtctgctgggttcaaggaggagaacattttgtttgtggggatggtggggccagagtggggactcttgcctgagctgaagccccttacagcgagggccttttgcagagccccgaggctgcctcaaacctccacttttctccggcatagaagactctcactgacctgagaatgagcccagaggcttgctagtaatagaagtagtagtgttagacactcagttgtgtctgactctctgtgaccccatggactatagcctgccaggctcgtctgtccatagaaatctccaggcaataatactggagtgggtggccatttccttctccagggacaggccgggaaacagtttttctctaataatgcctggatctttagcttcctttgtccttgttctgcttaacagaactgccaaaacatagaagcaccttcatacctctggtcttctgtggctagaggaagcttgagatagagactttagtccttaccctgtggagccaaggtttgaagcttcaggaaaggctgctgaagggtggaagtcctgccatgagatgctcacagggccgaggggcagctgacggagagtaaacccacgcactgacaggtagtccttgcttagatgctgttgctgaatgttgtgccctctgggaaattgttcttcaacaaattaaacagaaacgaggagga

SEQ ID NO: 64659 - DNA, 1182 bp, Bovine  19866881370380
  misc_feature (1)..(1): n is a, c, g, or t
ncttaaaatccttcagttactctgctttgtcctgaacaagatcaagttctttatcttgacattcaaggtcctctgtgactccttccccccacctcctcctgttatgttgaggctgggcccaattatcagtggtccacatcatgcttttttattcactccgtggcccctgctcctgctttcccttctttttgtgtgtgtgctgtcctgtccacccctttttgcctggctggatccagcttatcttttaagcatcttatcacttgtcattttcttcaggaagcactctgaagatccgcccactatgagttaaatgtctctggtctgagttctcctggtcccctgtgttcaccccgtacttagcatttgatgacacttgatgttatctgtgtacgagtcacctgcagcacatccaattgctccctgaggatagagactgttattcatcattatgtaaccagtacctggcaaaacgcctggcacaaagtcagtgtcgaataatttcttgttggatagaattccggtttcttctgtcttacaacttggaaaatgattgctgatttgttagaaagactctggatgtcatattttcaaacatacaggcatatggttctattaatgtatacaagtaacccagtgctagctctgaaagctgaagaagctccctttttttgaggactaaatgagctctaccttccttccagcacccagttctccaagtgaaagacggcagccatagagctattcagtgcaggcaagttctcagtcatcgtctcaggtgatatttgtggcaaaacaaaagaacggacagttctcacaaagatctctgcaaaagaatcacctgagtttaaaagtacaatggaagatccgtgactgtttcctccaggaagctcagaattccttcacccttgtgctcaccatactggctgcttgtctcaacaacctttcaagattctccttgcattcctgcatcatttgttatattgtggcattctgtccaagtaatgatcagtccagctgcctttaaaacaatcactttgagagggaagtgggggactcagtcatttacttattcatcagtgaatattaattgagtgccatactactctgagtatccatctgcgagaaagaaatagacaaaaacttttgtcctcataaagcttatatttatgatgctgggaggga

SEQ ID NO: 64660 - DNA, 627 bp, Bovine  19866881385946
  misc_feature (1)..(1): n is a, c, g, or t
naacctgtgtctatggccctctgttcttttctgcacatggcctaaaaccggttggctttttagcctaaagaaaatctcctgaagagaaagatgggaggcaggggaggagacatggtgtatcccttgagcctacttcagaggcttctggggaggaggaggggtgtaaggattgaaccccagggggcagactctgctgtatgacgcaaatgaggctcgaggacttcagctcatttgtcttctgcagctgatgcaatttgagtgatgtgagctgatgagaccccctctggcacccaccacccatacactgtcaaggacacaaggaacctctgagatcaccctttgattaacagcaaaacaaaggcctcagggtagggtcacactgcaagttgacagcagagtcaggatttgaacccaggcgccctgctcatggctctttctctgcagtgcaggcctgggagccacttcactgtgtaggagtcaaggggcctgttaggagtgagtggtcctttggttatgacctttcctcctgtgcatggaggccctgagcttactgtgggctatatgtccacagtgatgcctggctggcagggactcctggccataccaggtatgactctttctggggtt

SEQ ID NO: 64661 - DNA, 916 bp, Bovine  19866881810356
  misc_feature (1)..(1): n is a, c, g, or t
ntctggaaagtatctggcagagtataaaacaggcttttaaaatgtcctcccgtttggtctagttttcatatttctaaaagtctgtcttaaaaaaatagggaaatggacatggatttatattcagagatcttaactaatatgaaacttataatggaaaattggaaagaatctgaatgtcttacagaaggggcatggtaaatcatgtcagttatgtagctgtatgatgggatattttgcagccaacttttaaatgcctaataatatgaagaagtactcatgatataatgttgaaggaaaagaatctgggtacaatattttatgtacagtatgatccctctttgttacaaaagagaaaaatatatgttatcacttgcagtgataaaaaggccagaggtggtacaacacattgttatcagtgatgggattctaggtgatttgttttcttttttaaaacttgtctgggtttttcagattttctacaataagcctgtgtgactttgtttttttttcccccttgatcataaatgttgtaaaaatgtgtctccacactctgcatggcaccaaaaaagacccctacttttcagaatttgtaggcaaaaaaaaaaaatggtttatgttagggttcaatttgccaattatcataatgtgcaaatgggttttggattctctggctttcacgttgtacggtgagcacggctgctgttgccaacagcggcatatgagctccagccggcccatctgctgcttaggctcggcttggctgacacagatttatttcatttcattctttaatttggcaacattttctcttttctcattatcattgctgggattcattttgtttaccagtttgctgttttcttttgttccctgtcagaagacgaagaagccaacaatgggaattctgtcttctcaa

SEQ ID NO: 64662 - DNA, 1050 bp, Bovine  19866881920443
  misc_feature (1)..(1): n is a, c, g, or t
nactcctaatttattcatcattcccctttccctttcggtaaccagaatttattttcaatgtctgtgacttataccatttttaaagatgatttttaaaaagtaatgtatagttctaaagaacagactatcattttctggggactgcgggtcccctagggcaataacatgtaggatttggaaacacccatgaactcgtgtgaaccatggcagcctcctctataaaagcctctgagctgctattttaaggaagtgaaagcgaactgaagagtgtcctgttgtaacacaactcttgtgggccccagccttcctctgctggctttgcccttggcctgcctctggccgggttcctgcagtgaccagagtctcatgtttgccagggtggcttaagttttgttctcatgtacaagtcttctgggcacactggtaatttcagaccatcaggataatatacaaaaagatgtgtcttgtggagttgatgaacaatccagcctgtagaaatgtagataaaaactgaggttagggagatagtgactcctgccagagctggggactatgccagagtccttggtgtcgatgccatctgaggcccacagggattttaatccgctgaactgagcaaccaagtcttgtgggcccagacagggcaacaatctagcagtaccaccaaaggggattcatgccctacaccgggggaaggccttggcctaggtccccaaaggcccagtcctacaatccattcctgtgctcagcaaagcttttgttgtgcctgtggaacccccgcctaaatgctgggcacaggacaggactatttgtccctagctgttcacaagaacgggtgccggcgcctttgattgacgctgaccgctagagggacctccactccaggtcgcggggttcgagagcggccagattctagggtgactcagtcttccgaactgggggcgctcagagacaagaaatgagattgccttcaggccaacctcaatttgaactagatcgcctgggctcagaagctgggactgcctctaaaacattctttctatgacatct

SEQ ID NO: 64663 - DNA, 1389 bp, Bovine  19866880364231
  misc_feature (1)..(1): n is a, c, g, or t
ncttaggagcttctttctccctaaaagagaatagggctacttaagaagaaagcccgatcctaggtctaggtaaagaaatttacaaaatgaacctgtaaccctatcatgcctgacatcaaagatgatatgcaagggtattacatcatttcataaggactccagggccaacctgcaaaagctcctcctggccagagatggataaacttaaatatcaataaggacattagaaacagctatatcacagcagtgtgattaatacagtgaaaatacaaacacacacaaactggccactctaggatagaaaggaataaatttttattttgaaggcaaataaagcaaaatcaacaagcatctatcctattttttgtatacaaactttactactagatgatcaaattgtagaagtgggtaaatttttatttagaagtatccaagataataaagaactcagagctgaaatatcacttttataatctctaaagaattaatgcatctagggtagtcagcatcaacacctgctaccaccacaaaaaaaaaaggaaattatgtgccttctgatggaattttaccacttatgaaataatctcacaaaaaactaaaaacacgacatttggaacaactggaaatttgaacactggctatttggttctattgaattgtttgtttctttttaagatatgacaatggcacttatggttttaagataaggaattatcttcagaaattacatactgataaacttttggacaaaatggtaagtctgaaatatccttcaaaataacattgaaggaagaaaaggcaggtgtttatgaagatgaaacaagatgagttatgaaaaaatttaccacagtaaaaagttagagaacaattttgacatttttctaccacaattaaaatatatcccaatccattactaaaatatatgtatatgattatttataccactaaaaatttaactatgtgtaaataaccatatagatatattttcatagatataaacaatattaatagatatcctaaaacaaacctaaatatgcctagtggtacctctgggacaaccactcttcgcttccaagcctgcaggtcacgctccgtagccatctgactgcgcggagcattctggtgcatctgacggacaccttccacttgtccactacgacgcagaccaatatttggaggagactggatgtctaagcttagtcttctaaaacctaggaaaaaattgtaaagaatgactgcaaaacaaacgtcaatctaatatgcatacacattcctcctaatatgatacaaaccaaaataaaacgatctactgaaaaaactttggaaaaaagaattaatgtgacttagataaaaatgtagaatacagaacatgattattaacatcatttt

SEQ ID NO: 64664 - DNA, 1004 bp, Bovine  19866880450302
  misc_feature (1)..(1): n is a, c, g, or t
ncagaagtgttgatgactctctgcccaacccctcactcccacccaggttggctcagtgggccttggagttgttcacttatggttctcaggtatgaatcaagacaggctaggcctcgtagacgcttgcctaactccagctctgcaggtgagattacgccccatcaggcacaccccagcagggctttagggggaaatccagtgatgcgttcaggcattattcactcttgctaatgaataagtcatcttgggtagacaacagaggtctagggaagtgactccagggccttagaagaaagttatgagccatgttgagtctgaaccttaaagcaaattacccgtttggtgtccaggctaaatgccaggcacaggccactgggctgagtcttcttgcagcaagcagctgtgtcgaattaccctgatgccagctcatagggacgcagtccagcacatgtttcagtccttacacacagaaacttctgtgtcatggggccagtggcctatggacctgaagatctctgagaaccaaggtggcagagagcagggagggcaacggtctacctgcagggtccagagagtccaaaagcacccgtttcgactctgggacatcaacagtggtgccactcacaccactgacaccaccaggtgtcatgagctgacaacctgccgtttgtccttggcagcccttgcccggtgcttaaggccaagagctggaggaaaatgtgaattcatgcagggaggaaagaaaaggatgaatacctcctccagaaaagatcagcccaaaactgccaagggttagggagccccctgctttgtttcagtggctaaatctctgactaggcctgccaaaggtaacaaataaaaatacaagatgccgggaaaaagtggtgctgggacagctaaatgtccatatgaaaagtgtgaagttggagtctttcttatgtcatataccaaatgtgctcatggacttaagcctaagaactaaaactgtaaaatgggcttccctg

SEQ ID NO: 64665 - DNA, 1781 bp, Bovine  19866880489569
  misc_feature (1)..(1): n is a, c, g, or t
naagccctttggcctcccgggttggagctccagtcctcccacgtcataaaacttgtgcttgtctgcactgaatataaaacacaaaatacagaaacctgtaaaactcatcatttctgagcactgtggactttctgcaaaaggcacagaagagccagcttactcaactttcccaagtgactcatggaaaacccatcttacctgcatcagagaaaaatagaggacaaattcagaagaaaataatgaatactatgaacaaaaatattcattttccagaaagtttggaaattcccaaccaagaaattacaagatggaagcagagagtccagaaaaaggagaatgaggaaaaagactggagtagtcaaacacagaaacggaacaaatcctgaatgataaagtcaaccaactaacatcagtggctgaacccatgctgaaaaccacccttttgcttggcctccttagagatcatgtggatgatggaaacttgaaagcccagcagtagagagaagccggaaatggctatcaatggatccattcttaggccagaagctgatacgaacatgtcattgatgatgctgacttcaaagtgttccttcagagtcctgaaaagaagcagtaagaaatagcccaacaactgtgggaggaagagcaaatgaatggagaccttccaggacaaatatccagtctccacacaggagcatctgttcactgtgagaattcctagctagaaagaaattcggcagctgaggctgaagctgagaattctgcctgaagtgcatgaagatcattgaacacaacttcacaaaaattgtttgaagagaagatctaatgcttagaagaaaacaaacaaagaaacaaacaaataaacttcccagcatgtgtaggaacatgaaagccaaagttttatcagaattgcaacctctacaagaagatggtgaaacctgggcaaagagttgaaagaagtacttcctaccattgaaaggagatctgtgtcagtgagaaagacctcaagactgctgggtggcagctgtgttgactgaaggaagattcaaagagctaagaaaagcaaatgaacacaatgggcagatgctagccaaggttgagtccaagttccagtcttttccaagagaccattttgcgcctgctgctccacttgcaacccatagaggccccaaagtgttaggagatccccagtgctatgagcccaccttgggagcaggagggtcacaaactgaggtcttgggaacctgatgtcacctgcgggtttgactcagctgccacagaagctaggttgtgaacacccagaaccatagcacacaattgcctgagttttctttttaatgtaatttgaatgtttctgtttttattttggctactgttactcatttgattgctattattgaattagataaagcaagataatttgtaaaagttttttcaaatgaaattgtattaaatgtagtttctttgaataattcgtgtaagtccttagatcatcttgaataagatactgtaagttgtattttgattaaatcaaaattactattaagccaaatgacatatgccataaatagagatgcttaaaataataaagccatttctatatgctatgggctataattaaaaatctggacaagtaacctaatatttgtcataattaggttggctttaagaaccaatgcaatattaaaaaaatacaaatcacagacatcagaaattatatcaatttagttctaaaaccactgattaatttgggaggagtttacattttatactcatctatt

SEQ ID NO: 64666 - DNA, 1738 bp, Bovine  19866880501871
  misc_feature (1)..(1): n is a, c, g, or t
ncagtttcccctccgtaaagtggggagtgggtggatgatccactgttggtttaggactgaggggagtcgatggcctggaggttccacggaagtcacggccacagccttccagcaggagttctgcaaaacacagatggcttctgacagccacgctctttccagaagcatcgtaggttcagagttcagtgataaagctgacactgagcagaactgggactcaaacccaggtcttctgtctcctgatgcttctcccttgccgagataaccagactgagttttgctgatgtcgttgaaactgctacccaggactcccccaggcttctgtgactgcccttggctttgaattttaaatgacccaggagcttccaaccagagccctcggacacacagcagctggcagcagctcagtcctctgagtggatgagagagtcccataacctgggctagatgttaacatgtcttttctgtaagaacgcgacagaagagtgagactcatgcagggaaggaggaaaccccttattgtgtaaacccttttgcaattcctgggcaaggttagaacatgtgatgatgcttgaaatctaactttaggggagagaccatttttggtcatagctggtgtgttgacacctttgcaactggaaatggcatagcctctgtccatgtgctatgagtaactgacccctcctgcttgccaaattcgtgttcagatggcaaaacagcctgagactgccacattggacccctgccagttgttcctgtgctgtgtacatatgaccagggcttagcacgcacctgtgtgtttacatggcagggagccagctaggctgattcaaggtggacccacggcctgggcaggctggaaggacagagacagtagtggggggaaaagggtaaatagaaaatggacaaaaatattgtgtatcagccatgattcatctccatgtaaagcccttcagaaacaattttatcatttgctggtaaactccaccaaataaggtctgggaagaggtcattcatcatcacaatgcaaataggactgtgggtcctatttggtgggtctcaccactttgcactgacttgctcttgtgctccgacccgcaaggttcgctgtagggccagctgtgcctatagggcccacctccaagctgagatcagctgtttccacctcccccagggcctgtgtaggggattagatctctatttcagagcacttagggagaactgtttcctagaacctggctggcctcccctcccctagcctaactgacagccctggttgtccggcacatgtttaccttggagacggaacacttcgcagggttctcagtggtctgctgaggtccccgggacactggatctcagagacagagcagtggagccctcgcagacatggagggcctgctgcctgccctgggatctgccttccagctgatgctggagcatttatggggcactctgctggtggtttctgagagctggacacacgactcaggtctccctgagtttccctgggagatcctggtatgtgctatggtgctggttctcatgataaagagatggcacaatttaagaagtgtgaagtcgctagggaaaaggtcttctgcccgtgaggaagtctgcggaaaatgtagtgagaatgttgggccacgggctcaggctgacgaagccctcaagccacctcgggtggaggccagttctcccacgtcacaaaccttgtgcttgtcggccgtgaacgcaa

SEQ ID NO: 64667 - DNA, 501 bp, Bovine  19866880512890
  misc_feature (1)..(1): n is a, c, g, or t
nacagagcttgggatcaatccataaaacagactctttatggacaaaacaataggaccaaagtgccgaatatttattgttcctaggatgacacatgaaccttaaaatgtataatatttggattattcaagagagcccagcaagaaggatgtcccacggatttttggcagggacatgcctgagattgtagataaggatcagtcctctggagcagcccccacaatggaaaactacatcattcagtggaacttttccgtctctatcaattggaggatttgcctgagaacacaggcagcataaggcactcttagccccaaggtcacccatcgtctactcggcaaggaccacttttccattcgaagcagacctcacgagtacagtttcattaggtaagacggtatgtggcatgccctccagccacacatgaagaaataatccaatttccatttaaataactaatgtttcaacaggtttctctaagtggttaatgcattctttagcgt

SEQ ID NO: 64668 - DNA, 1254 bp, Bovine  19866880516097
  misc_feature (1)..(1): n is a, c, g, or t
ncgcctcctgcgttccactgagccactcgggaagcccttactaacaccgatttgcaaggagtcacaaagagtcagacacaaccgagcaaccgaacaactcacaaggcaattttgagggttaaaaaaggtaatgtgcataaaacaatggcaacagagcctgggtcatactatgatcatacaatgacaacagcctgggtcgtactatgagtgtgacttattatttttattctttaaaatagctcatacggggtcatttccttagttcagaggcagtgctcaataaactacaggtatcgccttctcacgtcccagtaatagtacaggaagaaggttccagaatgcccattttacagatgaggagactgaggttttgagagataataacattaccatggccacattggactcaaactgtccaactccaaaagcaaaacttatatttcttcaatcatcaaaactttgatgatatctggttgataacctttctcatatacacaggtaacatgcacatacatcaagttagtgtaataatctagcttatttttcggtcaggtcatatccatatatgtccttatattgttatcagggtcacaaggactctttgtatcctaaaaaatagatttctgccttctggcttattcttcaagatttacataaatttaggtcctggaacagatctactcagcccaaaatttggggctcaccacctaaaatgatggaaataacttagttttgtagtaatttccgggcaacttcagattaaatttctttcaatctacaaagaggtgtaaatatttctcctggggaacaattggttttggttttctaatttgatttcgaaaaaaaggaagtggaatctctgtgttttgcagagagcaaggcatttcagtgcatttgggagatgttcagatatccgtgtaggtgtttttaataagttagttcacctaattgtatttcctctctactaaagaagaagcatcctaccctaatgggtttaatcttcctaaattattttctggttttaattgtgctctttcccacaagcacctaatttcattataagattgtaatgctttgctgtgaaaagcttgcttgcacattaggaatgctgggattcaaatgtttacagggggataaaaatgcaaacttactcactttctcaagagggagcagcaaagtacttgaatgcccacctgccccagtccttggggtctttgggaggtgcataatgggaggggcctgactcgctcaggg

SEQ ID NO: 64669 - DNA, 1262 bp, Bovine  19866880531723
  misc_feature (1)..(1): n is a, c, g, or t
naattaaggaagtaaagagcattccttaatttttttcgggccctagtcaaggacaattatcctgactcaatctgtcaacaatatagttaacgcgaactttgagaaggaaagcatcatacttttgaagtggtgatagctctctcaacaaccaaaggagaggcaggcagaccacctatcttacttggtaatgtctaagaatatccttccccttacaccagagtagaaagagaaagaaccttctaccatgtcaactggaatagagaaccaagaaataccaacacttcagaacattctaacactgatatcagagtctgatgcttttcaatgtctaccaccttaaggatacacaggagagaaaagggttaattttgtctgaaaccaaacacaattagggccaataaataacaaagggtgggggtactgtaacacaccctttagctacaaaatatgtaaaccacttgagtcaagtccatcttcaggcacaaacaagctaggaatggccacctacactgtttggagtagcacagcctatcaagtaaaaatatttggctcgaaaataagtgtactatggtatttgatgatgtggcaaaagtcacgctttaagtgaatttcaaaattattttcccacaacagtttcttagatttatactagaggtcactaataaagatacttagttgcaacagcaaagaatgcttgggattgcacatggcagcagtagactaagagagatggagaatgacaaggattttcctatataaatgagatttgcaattgcactcttaccaaaactctacaatttaagagatgggggaacactacatataatttaaatactcttttagccctgtacactctattaaagaacacactttatctaaatctaaggcacacaaactctatttcacagagtaagactatggaagaccaagattttggttaaattccataaatggaaaacaggagatcttggaaagacaaattatataatattttgttagtgcacaatttaaaagaaaatgctagctatggtctggccttagagatttaaaatatacaatcaaacatttaaaaaaaaataatttaccagcactttatgaattcaagtttataaaataaagtagatgatattttccttaaaaataaagagaaaaagaagacccaacaggacttggaaagaaaaactggaaaccatttcaatgaaaatgataaaatctggtaaaatgcaatctactcaagtagccagggaaagaaaaaaagggca

SEQ ID NO: 64670 - DNA, 1226 bp, Bovine  19866880581039
  misc_feature (1)..(1): n is a, c, g, or t
ncgcccgatggatacagctggatcccattggcactaacgttgtttcccctccagtaaaaatggaaatatattaaacaacaaaccaaccccaaagacactctgagctgaaaccaaaaatcaatcagaaagagaaaaacacttgggttggtgtcaagagaaacaaacccacgccagcacagacttttatgaaaatggtcaccgaatagtatttccatgaacaggcagctgactcagaggtggagggtgagtgttctgagcactgtctgagcggcccgcccacgcctggagctgacgggacgcttactcgaagggacccagggatgccgaaaataggaaaaactgcacgaaggaaaaagaaaaaaaaaaacagattcttaggaagggaggggtgggcatgctgtgaaaccagaggggtttgggaagaagctcagagtgtgtttgagtttcccctcgttaccagcagtcctgacagatctctggttctcaaagccagtgcaagtatccagcatcccttctcctctagaaaaaaatcacacgatgaatacatctctgtgagagcagaaggcccaaaggtgaagttttgttttttcttcagctaagacagtttgaaagagacagttcattgtacatgttacattcggccacgactgagaacagaactggtctatccagggcagaggacccagagggaccgttctgatgcgagaaggtggatctctcaaaggggtcgaggcaatcagcctagccatcgatgtttcagatccagcgagacatatctagatggcaggcttactgtccagcactctgtccccgcgtccctggcctctggctcctcttgtttctgcttctgtggcttccctgggtgcgcagggctcctgggacccctccctgcctcatcttctgtcttcggagcttcagcccgtgctctcgcttccttcactttgctctcgaggcgcggaggtgtctcagaagatggtgctagggccaggaggaggcgaggtggtttccagtgcttccctccagctcgtggtattcggaggagtcatggtattttctgggagtttgcttcttcctggaacatggctgggagatttgcttccgttgagataggaggtccgggtggtcctgggcctctccgaccccttgacgtgatgcagagcctggctgttccttctaccccgcctctgatgctgtctgtgctgtgcatttggaaggtagaaggtgcg

SEQ ID NO: 64671 - DNA, 1684 bp, Bovine  19866880665614
  misc_feature (1)..(1): n is a, c, g, or t
ntgtttagcctggaaaggggaaaaagaacctccacagctgacacgttcaatccaaatttgactaaacagagcagtttgcaagagcacacttcagccatcgcacacccgcaaacacccagctggagaagccggtgggggatccatatggggctggggtaggggaccccatcacctgctctgtgccccagcccagagctgccaccatgagcgatcagtcattcaggagtttgtctccagggtcttactcaagaagcagtaaactgtgaggatcccgggtagaagtaaccggacttcaatctccccttccgagccacgctgcccatcggaggcgcggggtgccagcgatgacacggtttttcctccgagggcttacacacacgtggctcccatcactgtggtctcacattccctctgtgtttagaccacttgcctcgcacgttctcatatttacacatgttcactgaacgtaaccccgagtgaattatttaagaaggcttaatgtgcttcagacttctcaaatacaattgagactttaaaattgaatttgcactcccgtgggggaaaagagtgtggagctacccgcagggcatccagtggacgtgcagtaggtctcggaacagaactgcaggtaccccgacggcctctcccctggcagctgatgctccgggtcaaatgaatcaggactgagctacaaggtttaaacgtgttgcccgcctttgaaagcactgagccccactacacgcctcacagaccacaaacatcctcatgttctgacttatccttctaggccgatccaaaatgaagcatcggacaataagagattcgtcacatgcagaccagcacacaaagccctgtttgggagttgtgtgttttctggctctttttttttccttttaataaatcgcaatatcctttctctctgtgttcagttgccctgaattaggcgttaagattctgtgcagcaaattagagttgagaaaaggcacgcattttatttaactcagtcttgctaagtttgcggtaagcactgcccatgaggaaaacaaaccagaacaagggaaggacgttccctccagcttgggtggggatgagcacagaactacccagagcaggtcctgaatcctacacaaaacctctcattcaggggaaactctgggagacagtgaagggcaggagaggctggcgtgctgcagtccatggggtctcagagttggacacgcctaagcaacggaacaacaacaaaaccattcacacggtaaaagggctgagttgctccacgactacattacacaaggtacatcggtaatcagaagcagcatgcgagcgaggcgactgactttgtaagacgtgccgtgaaactcagtgctcagcaccacagaaaggtctgcgctggatgtgccctgccttcatggaacccgtgaacgaacatgtggtcttgggagctaattccgtagcaatccatccgacggttatcctttctttctctggggctccagcacctcatgaatgctgttcctcaaaatgaccaatagcattattctcaacacactgtccgcgtgcaaaaaaatgacatatgtcatctgtcgacatcagcattaaacagggaatactcaagatgtttacacctgaggttgtcagaagacgattctaacaaaaactatgcatcaccgggcatacaaagttt

SEQ ID NO: 64672 - DNA, 1515 bp, Bovine  19866880675563
  misc_feature (1)..(1): n is a, c, g, or t
naaaagaaatgttttctccccagatcccagcctctgtctgacttttcatacaaagattcaagacatcaaatgtgcatcccttacgaccggtaatctatgaactgagatccttagcgacatcacgctcaattcatcaagtctgagtaaccaattaccatgagaaatcgaatccaagccggttggcacttcctggagtgtttgctcttcatttagggaagggaaaaccgcaagcagggacccatcaaaggtgtcaaaggcggcctggcgctgcaaaggaaagagggaaagaaaacggaaacgttggcatttacacttagttaatgacctgttttaaaagtggtccatgggcagcctcaccaaaacaccctgattcaatttgccaggtataaagccacgcgtggcattgaccagttggcactctgagcagacttctgagaagatgcaagtgacccaaaggatctctttactctggatcacttacaggcacaccttggagatgctgcaggcttggttccagaccaccgaaataaagtaaccatcacagtaacgtgagtcacagaaatttcttggcttcccaatacatatacaagttactcttacagtattaagtgtgcaatagcatggtgtctaaaaactgtgcacatactttaattaaaaaatactttattgctaaaaaatgctaaccatcatctgagccttggtaatccttttgctagcagagggtttaaaacatgtcgaggattaccaatatgtgacacagagacacgaagtgatcaaatgctgttggaaaaatggtgccaatcaatgctagactgcagggttagcacaagccttcaatctgtaaaaaaaaaaaaactcagtatagcaaagtgcagtctatcaaggtctgcctgtcatcaaccacagaatcagaatgactgggaatttacttttaatggcctaatcaagttaaatgtataagttaagcaaacaaacctaaaacccagagagtcttagaacagtgcctggagggactcggagaccacctcaatccaaacacctggcccttctcagctaaatgggtgagacacgcagggccatgtgcataaggaaaatgcctcttacgctgttgtacagcagaaactaacacaacaatgtaacattatcccctaattaaaaagaaaaaatcctatgagaaatcataatggaaaataatgtttaaaatgtacatgtatatctatgtatatatgtgtaaatatatatacatatatatataaaccaaaccactttgctgtataacaggaattaacaacaatgtaaagtaactacgtgtgtgtacaggtaatagtatctgactttttgcaaccctatggactgtagccctccaggcacctctgtccgtggaattttccaagcaagaatactggagtgggttgccatttccccctccaaaggatcttccagacccagggatcaaacctgtgtctcctgcctctcatgcctggcaggcaaattgtttccaccacaccgcctagg

SEQ ID NO: 64673 - DNA, 851 bp, Bovine  19866880692571
  misc_feature (1)..(1): n is a, c, g, or t
nttttctatttcttttattcaacaggcagggataggtgcacagagctggctgctgtcttgcagtcagttcctcccttccaaccaccgcgggcatttgcatgagagaggcagcttgtggtcactgaaaggagatttttctttttatctctgagaagttattagctttcatgtggagcaaacctgtgatcttgcctttatcagcaaatgctgtaaccgattgagttaaccaagctgccccacgtaaatccgtgagtggttgaggtggctcagatggctaaaaaatccacctaccaatgcaggagacctggtttcaatccctgtcttgggaagatcccctggagaagggaatggctacccactccagtattcttgcctggagaatcccaaggacagagcagcctggcggctatagtccatgggctcacaaagagtcggacacaattgagcaactaacaatttcccttcaattctggacattaaccacctacaactgaaaataactttcacgacactttcaagacacactccgaggtcatttaacttattgctcagcccatagccctctttagcatcagtttatacagagccattgggttatctatatccaagacaataacaatgaacagacaaaggagaagccctctgaatcttagaaccgatgacaaaccaacctggatgcatcatataccccacatatggcatttaaagaaggaaaatatttaagtgcatgtattaagtagtaggaaggacagatgttctatgtaactaaccctccactgagccaagttatttcagtcatgtctcttttcaaccttacggactgaagcccaccgggctcctctgcccatgaa

SEQ ID NO: 64674 - DNA, 1625 bp, Bovine  19866880694240
  misc_feature (1)..(1): n is a, c, g, or t
ncagtgcccacgtgacgctgatggctggcgtgggctgccctaaccttggcacatttcttgacatttaccaagtaaaacgatgagatcagggaaaccacaacttcaaacccggtatcttgtgaaactgaaacagagtaaacacttgcctgacagtgatttttgttttgatcatcagacttgattgaaccacggggcgattgacatccatgctgtggagtcatatatttttttcagtgaaacaaattgcatttacccattccaaactggtatggacacttgactgatttctacctaagcatgaatgtaagaatcccagcgcttcagttgtaggctttaccactgagtaaacctctcctggtaggcaggcaacgtgcagaagagaagatccaccttgaaacctgatttgtcgccttcctacctaaagagtggcccccaaacctgcctgaacttcataatgtgatcttattgggaaataggatctttccagatataagtaaggatacagatgagattggactagattagcaaagaccctaaatccaaggagaccaagaagtacagacagagactcaaataaggtgatgtcaagacagaggcagagatgaacgtgacatagctatatttccaggaaggtaaggattgtggacgaccgcccagagctggatcagaggcatggaatggattctttcacagagctctcagaaccagccctgggacatcttgattttggacttcaggtctcctaaactccaagacaatacatttctgtattttaaacccttgctgctgctgctgctaagtcgcttcagtcgtgtccgactctgtgcgaccccatagacggcagcccaccaggctcctccgtccctgggatactccaggcaagaacactggagtgggttgccatttcctcctccaatgcatgaaagtgaaaagtgaaagtgaaggtgctcagtcgtgtccgactcttagcgaccccatggaccgtggcccaccaggctcctccgtccatgggattttccaggcaagagtccctagtttgtggttatttccatggaaaccctagaacactaacacactacatgtagatactgtttttaacaaactttttgccatttcaaggtgttacaccgcccattaattgccttatagggttaggacagcttccaaaagggcttcaaggttaactcccagcttgcagcaaccagacagcttaaatttttcagaacaaaattacttttgcaaaattttccatataaactcctttgtctgaccatgccctgattttcatgcttgggaaaatgtgtctcttgtaccacttgcggggaaaatgtctgatttacattttaattcaagtcttgatgatacggggggcagggcgtgttttaacaaacatctttaaatctctcaatatttgtttgaaaagaaagttacaagttgaaggaaaaaaaaaaacagaaaaaatttaatttaattaggtaaattaaaacctaatttctttagtatgtttttccagccaacatttatgggcaaatttgtcaagttatgatagaagtagagtgatttacaatgctgtgttagtgtcagatgcacagcaaaggattcagttgtacatgtatacatacacc

SEQ ID NO: 64675 - DNA, 1327 bp, Bovine  19866880710500
  misc_feature (1)..(1): n is a, c, g, or t
nacagaagagcctggcaggctaccgtccatggggtcacaaagaatctgacatgactgagtgactaacactactactactaaagcatctctgcaggtgacttcaaggcctgctttgaagtcaatctccaaagcacaaaaggattctttctgcacctctttacttcggggtgggggggggggacttacaaaccaagatctgataagggcagttgatgattcaacgcaatgaactggctgccccttagagctttgattggctctgacaaaggctccttgaacttggttgcaaataagattggttttgttttttttggtctcagccttttctgctggagaccttcacttaagtcttgagaggctggaggtttgctggaaggttctgtaggttgagatctgtccttggtggggatggctgaggggcctacatgaaatggtcatccagtcacttcaaggaacacccggggatggtgccagccaaggacattttgggagatggtttttatacaatgaatcttttaatatttaaatatgtgatttcaaaaattagaatgggttagaaaacatagaagggattcaggaggaagaggagtatcgtagagaagtgatatcatgactgtaatcctggaatagccaggtttgaattgactttctcataaaggtgttatcacgtggttgaatttatatgagttatctacatttgtaatgaagttccagcatttttttcagatttatattttattctataagcatagctttaataataaaaaaaaacacaataaatgggatatttgaattttttttaaaaaaggtgttagagttttctttcattatttattgatctgttcatttctgtcccaaagctcccaggcacggacaaggggctcccatgggggctttttgaaatgtactgtcatgggttcccccaccagaaagtctgacacagccaggatggtgggggtggggggcaaagaactcttcagacataaatcataccttttttttgtaactcagacacggctgggcgggggtgggggtgggggcggaaatcaaccagtagaaaactagagttctctgcacttgagctctacagaaataaccatttcaaatgaaattttagactacttctcttcctagtcctttgagaatcactgccaagttgctaagtaaagtatgtgcaccactttaaaaaaaagacccatttgtggcaatacctatagacttgctgtcatgggaaatgaaaatgtccttctctctttcggctctcccaccaatataattatgaaacaatttggctttttcagctggttgactttgcaagttaaagtaa

SEQ ID NO: 64676 - DNA, 2371 bp, Bovine  19866880776834
  misc_feature (1)..(1): n is a, c, g, or t
nccctccctacagatacaaagaagtatctgaatctttagggagcacacgcattttcacaaagcaccccccaatccagtgtgtaccccctcccattatacctccccccacctacccagggagcaacttcatcactctgcaagtgcatgaacttcacagccagcagggcacagtgtgctatgaatcagtgagtggggaaaatcacaaggacaaactcaatgctctggatctgagtggtagccactcagggtactgtgcggaggtaacagcccccgctccccactgacatggctaaaatcccttagaaccagagccctgtgatgtttggggaaacagtgagctgaggatttaaacagtaacacgaactctacaaaaccgtgtgctgggccaactggagagcccgaagcaggcacaggaaagacaaaaagaacacaaagcaggcatcttgaccacccagcaaaagcaaacacatcagcaaacagcaccaatctgagaaacgggcatggcagatggggagtggggcggtaggttgaggggggaacctgaatctaggggctccctggacagatcacaaacggagcaagcggatgtaaggagtctcaactcacagatgctgggttaaaaatcaaatcggcaccacggacttagtgcagtcctgctaatccacaaaggcaaaattagagcttcttcaataaagtttgcaaaacagggtctgccttcccatagcagcactggagagaatgctttttacacactcaggacaaagaaaacaaggctctcctgcctggtcctgcagaccccaccaagcctcggaggggaataacatactatgtaatgttagcattggctcactggcttaagagaaacacgaataaactggcagaaatgggctaaatgcgagggacagacttcacatcatgaatgagtaagaagaaggctttcacagcacaaagagtaacgatgtgaaaataggagtgtatcccctagataaagcaggatattctggcaaacacacccaatgaccaaagatgtaaacgcagtataggatttagacactgggccagcttacgagaactgaaacaacgcttcagtgtgtgtttggggcgggaggaacctatcctcacatctggcatagcattatttcaccacatggtcttctaaagaaagaaatcaaagttaacggagatcgatttaggggaagaaattgataaaagctagagatacggggggcacacagctttcctgcacatctgaaaaactctcctctgcatgaatccttcatgaggacggccatagccttcgaaagagcaaaagttgcttttcttcgctagaggagaagtcgtctaaaaatgagacagctttaggataaaacgtttcatttcaaaaggggtgacgtgtggtccgtattctggaaagacaagagagcgtgcccaggagggatgcagagcgtgcccaggagggatgctaagtaagccaaagcagccaaacatctaggacttagtacaagtgaggaaaaaataaataataaatggaatcagatacacacacactcacacacacacacaccaactcagcacatcagaacaatgaaggggtagaaagaaactaagggtggctttcagagacctgcttcaaacgaggaggctccctaaagctgacggctgttctttagaagaaaaggaaggccgtacaccaacagcaagcctttgttcacccacgtgactttgcctactgcctgcaggtttcatcatccctttggtcccaggatgaatgacaaaggctgaggcataggattctcccaccccagcggccctgggacttcaaagctgggaaacgagcgagcccagtgggattaaaaccagaatggaccgctgcacagggcctggtaaccaggaccacgtgaggcccttgtctccagctctgcaactgactgttcttggcctcgacgggtgctctccgtgctcccctgacacctggcttccctcctcatccacagccatctcacctacctacctgcctacctgccaaaggtgtgggcagatgccttagttaacatgtatggcttattccctcagaaccttcggccagcctcggggactcgggaactgttttggttgctttataacagagaattaaaagaaaaaaaaaaagaagtccaaacctggcagaaatgtggcataataatttaatatgcctgcctctatgttactataaaaagatgtgaactttagattggtgtgtgctggtgtgtaggggtgtttttctgtagcttcagaaagctggaatattctgatgtggccggtggcaggtgaccaatgccgtttttatgaacttaggagaaacgcataaattctaagcaaaggcccccaaaga

SEQ ID NO: 64677 - DNA, 1475 bp, Bovine  19866880822459
  misc_feature (1)..(1): n is a, c, g, or t
nccggggtctgcgctattactcgacaagaatatcatccacaagacgtcagggaagcgctacgtgtaccgcttcgtgtgcgacctgcagaacttgctgggctttacgcccgaggaactgcacgccatcctgggcgtccagccggacacggaggactgagcccacccgggctgggggcggggctgtcaaagcgccccgtcccaggaccctgaaaggccggaccggctcatccggcacgcctattggaagcagtggccttattccatcggacaccgcagttcttcgccgaaagcagcacggtttctcgcttctgaaagcctgctgctgggaacccgccacttaacgatgctattccattctgtcggcccaggaagaagcttggggcccccgggcctagccctgggcaggctgtacggtgacaggatcggtcaggctgttgggtcttctcaaaggagggagcgtgtcacagacgcacacttcttggatttttcttttgcctttttgcagccaggaatcgcacaagagctctctttggttctgagggggaggagggggcaaagacacattctgtttcgaagttagtttgtatatatgactgtaaccttgtaattgttatcagagtcccctaacagacctatttaacagaaactgtatattgtaatttaaaataattatataactgtatgtgaaaataggaatgcagatggcattttgccgtgttcgctggttttcaagagcactggcgtccttttgcaaacatttaatctgctggtgcagattaagagaagttgtaaagtgtgtattatttacatttaatatgcctacaggaataaggtctaagaaggttcattcctgttttgttttgttttgcctaggttgttatctatggcaaggactttgtacatttgggaatttttataagaaacttaatgttattatctgggggcctctcctggcctctctgcttctcctttaattgtaatgtaaaagctataaagcagtatttttcttgacagatggcatatgttttccatttctatgcatgccttgaaataagtttataacaaaacttactttattttttagttcaactatgttttccccagcgacacacctcccctgaccaggcatttccttccccagccccacccccacaccccaaattatgctgtgtgattaaaataggaatactatttttggaaatatgcgactccttttcagagatcaggagggatttatgtagcagctatttttactgcaaaagtaactcactggaaaaaaaatgtaatttgttagaaagttttatttttactgcagcaccatgagccatacagagctgaagatgcagggggaggggaggcttaattaataaacttctccggcatgagtggagcctgattttgtcccatcttgtttacctgtggagtctcaggatttcccaacaccaagctgctcctttctgtgagtgtccaccgtt

SEQ ID NO: 64678 - DNA, 1669 bp, Bovine  19866880904489
  misc_feature (1)..(1): n is a, c, g, or t
nctgaactgctgcaaaatcgagtaattcgtcgacgagatgatgttcgtaaaggaggctgcaggtggatgcctgcgtcagctgtccaatcagaatacctagaggaagagtcactggaaaaggaaaagttgtaagttgtatggaaccagaatctaagcctgaatagcaaattaatccaccttaagagagacagagacaacaaggaggaaagaaaagatcctaggaagattcaactaccctcaccatcaacaaatactgacatgaccaaagatcatgagaagagaaaaatcttcactgacactggaaattagaaaaggatgtaagcctgagtaaatgtttttaagtataatttagatgagacctcaagaaagacaacatcaaaagccaactaataatttccccttccaaaaatgaagtgtagttatgaaaacagtagagaccagaagagcagcacttcccctaaactgcaggaagctcagaaatggactagaaatgttaactggaatgacagatccgtcagtgagtatactgagaagcacaaggaaagcagagccacatcaaacagaaagctataagtgggcacggcttcttgccaagaaggggattctccctgatatgaggaaagatcccacagagggactagtctcggcctactctggagcaaaagcagtcaaataggaaactcaatctagaaaactagcccctgccactgccagctttagcaaacacagaagaggataaagaccctctaactggggccatcattacccaaccacatacctcccaggctccgtaaaacccatatccaaaagctatttactataaatgttatttctgcattatcttttacgctataaaaagagctgttttaaaaatcttaagagcatgtgctttgtataataaaattcacaataagctgaattcaaacataatgaatacagagacagaaaggcaagggtggtagttgccagggtaggtggggtggagtgatgaattgctgttcagtgggtatatgtctcagtactgcaagatgaaacgagctctggagactgggtgcacaacactgtgaatgtacttaacactactgaactctacagttaaaaacaattacgacgatcaatttcatgttctgtatatttccaatcaaaattaaataaaaaagactgagcaccaaagaattgatgccttcgaactgtggtgctagagaagactcttttgagagtcccttggacagcaaagagatcaaaccagtccaatcctaaaggaaatcaaccctgaatactgactggaaggactgattccaatacgttggccacctgatgtgaagagccgactcactggagaagaccctgatgctgggaaagattgaaggcagcaggagaagagggtgacagaggatgagatggttggatggtatcactgactagatggacatgagtttgataaacctccaggatgtccatcaccatcgaaggacagggaagcctggggtgctgcagtccatgtggtcacaaaaagttggacacgactgagtgactacaacaaacaaaactaaacaagtattctagaaatcactccagctcctaagcataatggaataaaaagaagacaagaaaagaagccaggggtatgatataatagtctgtaaagcaaagtatcaatggaaattaa

SEQ ID NO: 64679 - DNA, 1168 bp, Bovine  19866880915562
  misc_feature (1)..(1): n is a, c, g, or t
ntgctaacgcagacccacatcccaaactgagaaaatgtttaagaagaacgtcctaaggctctgggggcaggagggagctgatgataaaacactcattggagtcctcatgaattccctgtttgatcttgggttgctcacttccaggtgagatctagacctttccggatctcagattctcccctctgggggatgggaagtccagaccagaaggttgccatagttttccatttttaaaaaaatgtgtgatgcaaacagcatttgcttctccaaagctaatagcagtaccaaggtgtttaagaaatgaaataaacgtgaattcccatacggactttttttttttttaactatagaaagcagaattggattgcgttgtattctgtgtagctgctgcatgaggtatcattcaagcagctgagagttcccagtcatatttggctttgtggatttggctatagaatgtcagcctggccataggctaaccacttgtttgacttaaagcctcagaagaatggttcaacaatggcacattgctgtttcttttcaacaaatcatgcaaaatgagcagagataggaatagaaatcaagggtgaaaaagagctattcactggtataggtattttaaacatcctagaggcctctggttaattcacagcatttttttttttttttggttcatttatcatccagatgttcgccatcatggaagcaccacttgaaactctatctcagctaataacttagaaatggaaaaattcgtatctttgtctgtctgtcctttggtgccccatttcccccacactcttcttctaagtagctcttctttaaaatctcctgggaatgtggcagttttgccagatgcttaggtgttagtgggcacatgtctgctttttaatcttcgtgaccatgctgtaccctgtctggttgaattatagattgcatttgtcaaataatgacacatgcaattggatgtcttctaagacctttgaaattcaacttccttgagtcgagattaaagtggatattatctgcacggctgcagtcaggcctgggatgtttggggacctgcaggaaagtttttctgggtctgccagttccaacttttaccttcttgggaaagaaagccagctccttttttcttcgaaaggtagaaacagacaccagaaaaggt

SEQ ID NO: 64680 - DNA, 1224 bp, Bovine  19866880962495
  misc_feature (1)..(1): n is a, c, g, or t
natctaagtaaaagcagagctttgacatctccagatcaaacgtgctattgcttacctggacattcattcagcacacctgcataaaaacgcctttccagaaaggttgctggcccccctgcttctgttcagagcaccaaatacccatcacgtgtgattttaggaatcagtgaggatcaacaataaaaaataaagggacccaaatgctcctccgggctgtactggtgaccagctcattcagaaagtttgctcttggggtgaataccacccaccaccactcgccaggtgtccacgcccagacaaacagggaaggagggacgaatccctccacagctctggaaatagattctgggtgtgcaagccatttggccaagttaagcattaaacatttggaaagtccagttttgagagagtccatggaactgcatttccatgcacctcccaaaatttcaaaccaagaagaacaacagacagttcaaattagacaaaacattggaatcttgtgaaaattccaaagaaaaacatttacagaactgcagaattgttctcctttctttccttttttttaaagactagaacataacagacactggtcccctttgcaaaggcattgggtgtctgatgggcttcccaggtagctctagcggtaaagcacccacctgcttacacaggaaacgtaagagacatgggttcgatccttgggttgggaagatcccctggaggagagcatggcaaccccctccagtaatcttggctggaaaatcccatggatagaggagcctggcaggctggagtcaatcgggtcgcaaagagttagatgtgactgaagagacttagcatgcacgcacacagggtgtcctacagaggaccacaccggagcctcaagaaccctgggaccttgcagaatggcagtcagcacagttacaaggcacagcttttagatttaaccacagggcgcctctggcaagctgcttggtgaccaaagcattgagtaatgatagaggaggttggtgttcactgttgcctgcaggtagagagccctcttctctgggtcctcatcctagaggaggctcagtggtttgccaccctcccctgggttgcccccccaccactgtcagcctcagcccacctggcacaccatctacggaaagcaccagtgggaagtcctgggtccaccttctgaagctggagatgttgacaatacacgaaccgatctcttttacaaaa

SEQ ID NO: 64681 - DNA, 1166 bp, Bovine  19866881012375
  misc_feature (1)..(1): n is a, c, g, or t
ngtatgaagatccttgtgattacattgggcccaccctgataatccaggaccacctccctatctcaaaagccattcctttaatcatatctgtggagtccctttggccacagtcgcaggtttttgggaccaagatgtagatatgattctgcctactatgttatccagtgtgggtacattcatatgcgtgtgaaacattttttaaacttaggagataagtggtagaatgaaaatgtgcttttggagtaacagatatgacagtattgtgttttgttttttttttaatggacttttgcctaagtagatagaaaatcgtataatgacatattttgacatagtacagaagacaactgttcagttagatttttaccattactataccataccattccctggtggctcagatggtaaagcgtctgcctacaatgcgggagacatgggttcaatccctggattgggaagatctggagaaggaaatggcaacccactccagtattcttgcctggaaaatcccatggatggaggagcctggtaggttatagtccatggggtcgcaaaagagttggacacaactgagcaacttatgactatgataccataccatatcatagtgcagcttttccaaggctgagaaagcgtttaatattataaatgtatttttaggttcatgattggaaaaaaaggagcatcaaaacaaccaattatgttgaaaacaactggaagaaacagtgtaaggaactagtgaacttaatttttcaatgtgaagattctgaaccatttagacaacctgttgatttggttgaatatccagtaagttgtcattatttgaatgtttggtgcttttcttattggtgtagagattagggtagaggtgtttaaatgaaaaagtaagatgtctagaattccctggtggcctaatgcttagaattccaggctttcactgctatggcccaggttagtctctggttgggatactgagagagatctcacaagcctcaaggcatagccacaaaaaaagaaaaagtaaacaaccagcacctcctgccccttgcaacccagcaaccaaaaagtgacatctgggcttaaggttaactttgtctcttaccactaagtcagcgatggaagagttgttttaaaggttcttaattaatagaattcaagaaattgta

SEQ ID NO: 64682 - DNA, 1426 bp, Bovine  19866881033729
  misc_feature (1)..(1): n is a, c, g, or t
nacctcccccccacggaaagctccttgccggtgtgtgagaatgcgtgccagcacaagcgtgtgtgcacgcacatgtttgtgcatgcatgtgtgtgtttaacgaaaagtggcctgaagagttggtcacagtcttcaggaatcaaatgcagctttgagcctctcactgcggagccagcccgcgtcgaggggaggcctggagggagcagaacacgaaggctggaaagccgcccactcgaaccctggcacggcccgaggcaggagcacacgggcatttcatgtctccgtgtttgttttgtcttccaccaagaatgtagacgcagaaggggaaagaatctgagaccagaaagtctgattattacctgaaaaagagggtcagtgggactgactaaagccattgaaatgctttgaagattaataggcccgtataaacattaatttgttatgaggtttctcagaggacattaaacagagcgcagaaagcttgcatataaaactccgcatggagtcctcggctataattaacgtctgcagggtttacttgacgccattccagcacgggggagggcgtgatgaggaggtacaccagccctctttctttgaggtgagaaagtggaattgggggtttctaagtccttctaaaaccgtcactgcctgggaagcaagaaccccagtgaggagttagtgccagtccccagaaggggggttgagcagagccccttctggagaacttagggccctcgaggggacagaggaagaaaacgctggcaaggaggaaattttgccatttgcggcaacaggggtggatttggggggcattatgctaaatgaaatgtcagttaaagacaagcactatacaatatcacttatatgtggaatctgaaaaatacaacatacgtgaacaatacaaaaaaaagaagcagactcagttgtagagaacaaacgcgtggttaccagtggggagagggaaacggggcaatacaggagtgcatgcatgctcagactctctgtcatttgactctttgcgaccccatggactacagcctgccaggctgctttgtccatgggatttcccagacaagagtactggagcgggttgccatttcctcctccaggggatcttctccatccagggatttaaccccatctcctgaatctcctgtgttgacaggtatattcttttccactgagccacctggagaaaaaaggggttactatgggattttatgatatcatgtgtgtgaaacgtttgaaaattgtaaagctctacagaacgtgaaaaatctttccaccagtaaaaaagaataataaataaacttgtttaccatcaacagcagcaagcttgctcgctcccatctgcttaatgaggacgaaactcaagatgtctcagtaaccacagtcctttcaaagggactcatcatctgggaaa

SEQ ID NO: 64683 - DNA, 1189 bp, Bovine  19866881066618
  misc_feature (1)..(1): n is a, c, g, or t
ntcttgatatcagccttggtctttgagttgacaaatggtctcaataaaaaatagttccaaacactggcatgcagtcaggttcctggatgccttctgccactcattagagctttcatttgcaattgtttttcgatcacttatccattgtgttaattatgctttgtcggtttattaatgtctcatatttgctgtcacatgtgatcatagtattgtaataaaagccagtaatttgtaggtgatagcaggcggtaggcatccaaatgtgacctagagggagaagtgaatttatagattgcatcacaatatttttctcttcaaagttcccataatgttctcttgcaaagcctttttttttttttttttggtgtgtttgtcttgaggacacaagcctttgaaataatttttctccaggaagtttctctggtgccaattctccatgacaactgtttaaaataccctgagatgttttataaaaaagaaaccccaaacccaataatagtaataaaattactggaagcaagggtagagatcatccaaggcaattaaaaagtttctgagtagcagagcagtcatttctgcagttgcaattttaatcatgttgaaaattgtcattggtcttgaatccctttgatgagaaatctccctgggtcgcttgtaacgcctctggtatgagtgtcttggaaaaacaagtctaatttcaggcttcccttagggtagtggaagatggaatattttttccttttcttgagcagcatgtaattttgccagattccctctgagaagctccacatggcatcagtgtgataaatggctatgtggctctgcaaataatttgaaattctggggaaatcctgctgggttggcaggaagaagtgggggtctgtgccacattttggggaaagtagatatttgaaatgagccccccatctgaagtacacaccactggagtacacacgtattttatgtcagttgcccacctagacagggcagaccaagaggacattgaccatctctcagcgggggtactgatcaatctcagtccctggaggtggctgaactctccttggaaggcctgcctacagagaaggcagcttcatcccacacctggaacttcagaaagttggcagagggcttcaattatgtcgggaaagcatgcagatgaaggtttccctgggaactcttggtctga

SEQ ID NO: 64684 - DNA, 1459 bp, Bovine  19866881179049
  misc_feature (1)..(1): n is a, c, g, or t
nctccagtttgttacaaaatgttttctatttttcagtcatattttccatttcattatggagtcatttaagggcttccttggtggctcagtggtaaagaatctacctgccagtgcaggagatgtaggttccatccctgggtcaggaacatcacctgagaaagaaatggctacccactctagtattcttgcatgggaaatcccatggacagaggagcctggtgggctacagtccatggggtcacaaaggagtcagacatgacttagctgctgaagaatatggagtcataaaatatatgtaacaggcttaaattgatacattgtattgccacggttttaaatggacatatacctccactgtggagaaagcaatggcaccccactccagtactcttgcctcgaaaatcccatggacggaggagcctggtgggctgccgtctatgggatcgcacagagtcggacacgactgaagcaacttagcagcagcagcagcataactccattgtactgatagaagataaagatagttgattgattactactggtaattggtatgttttcccagagttttttgttgaagtcattttttgtaatgtatgatttagtttccttctgtttgtactttaaaagtttcattttactttgaatttttggattatcacttttaaggatttcttttaaaattttggagaaattctttgtctttacattttatattacttagagtaagctgtcaaataaaaatatttttgactgcagagtttcatcattaataatgccttacatttttaaaacacctttttcaaagaacagagttctcctgctttttcattacacagtttttacatttcacttatcctagttctgcatatgtcaccaacgaaacaagattagaacccaggtctccagactacaaagataattctcttagctaaagtaaattaaggcttctaagtttgatttaatttttcactcctcttgttaaatttctttaatatttttatcatagctcagctttagaaacatgtaccaacattttgtcagcctacatgcatttttcagcatcctacactcctagaatatgtagaaaacataatttgggagggggagttatttttcaaaatcgttctgtatacattattgcttttcctgggttaaatatgtgtaaagtgataaaacatggaatatgggccttcttagactctagcatccttgatagcttttccataagactttttttttcctttggtttattacacactcagttccaaacgttgactgccctggggcctggcgcgtcctccacacagtggacagagggtggaaagaagggctggaaaaaatgtggggtttcatgatgttacagaaatgagacctttactctggcaataggaattcacatttcaaaagttgatggttgtcaagctgatctaaaaaactttatgagaatgccaaaatagtt

SEQ ID NO: 64685 - DNA, 945 bp, Bovine  19866881355981
  misc_feature (1)..(1): n is a, c, g, or t
nggaaggcttttttgaactgcaacctttacaccccaatccaatagttctttcggctttgaaatgtccacaatctgaattttatagggattactttttattataggtagagcaattaaatctcccatattgaaggatgtaaaccttttaaggcccttctccaagtatcaaaagaaaaggaggcttatatttaacaggtgtgacaacccaatgcaggacatttcattgaccaagagcttgacgttctccagtaacaaatacttaaattaatccgagacatctttcagataaaagggatttcagaaagaattaagtcgaccacaaaacttcatacagaaagatcatctcatgtatgaaatacttaaaaatgctaattcttgaggaatgtgtcaaggggtgtttttataaaatctttccttttaaattatattttatgaactttaaatgatcgtatttcctatccatcccatagcatagataatgaacgtgtcttcattacttgtatcctgttgacctttcaaattaattaactggtggaaattgcccttgaccttgattatggcccagactgaagggagtgctctggtagagggtaagattatatcatatgagagaaaaaatttcctaactgcaactgcaagatacaatcagttggaggagatggtgtcctaactttgcaaaactctgagattcttggttctaagatttttcactgttaatagactcagctttgaaagtggtctcagtatgaggttttgttttttacaaaacaattctctcccccttctcctcccctctccccgctcctctggaaaatgtgtgaggtgggcatgtttgtgatggctttctctgtggggtgtattttgaggaaggggagaaaagtatcaaaagggagccacagataacattggttcaaatattgtgttttttctaactcatgttttttt

SEQ ID NO: 64686 - DNA, 1081 bp, Bovine  19866881391255
  misc_feature (1)..(1): n is a, c, g, or t
ntccccatcccatcctcagggtcatcccagtgcactggccctgagtgccctgtctcttccattgaacctggactggcaatctgtttcacatatgataatatacatgtttcaatgctattctctcaaatcatcccaccctcaccttctcccacagagtggtttcctcgtctttgcgaccccgtagactgtagcccaccaggctccttggtccgtggggattctccaggtaaggatcctggagtggggtgccatgccctcctccagagatcttccccgacccaaggactgaatccttgtctcttacatctcctgcattggcaggcgggttctttatccctcctgccacctgggaagccccatttttcaggagagggctggtcacttttgtttttgcagagccacctgagtttctttgtggcctgaacacctgttgtaccataagaaagcattttgccccttaaataaagggaccagagactaccggactcctggctctgggatgtgtcggggttagaactgctgcctagctctgtgtctccctgcaggcttgcaggttcagggcctgttgggtgggaggctcgtggagtgcatgcgtgctcactaggtatgtccagaaagatgtttttgtttcccacttggggttttatccctgagactgccaattaaaccatcccataaatcctccgctataggtagtaaaacctaattttagatttcctgcttgctccagtgtcctgcttgcttgctacttgctggcgaaaggctggccctgggcggcaggcacttagttcacgctgcaccacgtgttcaagcctttttctcacatctttggggttgggtctgaattcactgattgcttttaccttgagtttcaagaccttctgaggatcgtgatttgcagaactctgcagcgtacttggttctttttggtgaacaactttaatgcaagagaatgagggcagggggcaacaagaagggggtggatcaatgaagaagggtgaaaacctctgcagtttttgttcagaatatgagatctgtcccctgcaggtcgttcatgctccgtatctgtaattcagacccg

SEQ ID NO: 64687 - DNA, 1057 bp, Bovine  19866881588719
  misc_feature (1)..(1): n is a, c, g, or t
nagtctttgttcctaaagaaccaaactcctttaactctcttccctagtaacttctctccttgagacgaatagaccaaaacacacactctctactcaacggatggaattttccaaggggataggaaacttaagtctcaagtgaagacattcagtgttttgatattaggatgggtcttttagagataaatgttggaagccaggaaaaatagcatcaagaggaaataatgcatgtgtaggcagcgtcggaaatatagagggttcacaccatgggaactctgaccgctattatttttgaatttccttcatgttagtacagctgtgcagatgccatgaagcagggttatgtatttcccggcccacggtacgggctcagtccgggcgatcccagctatgacctccatccacagatatacctgctccatcctcattgttagccctgagctccctccatcagcacctgtacaaaggatgctgagaatgaatctgtagtttcaaagttcccagatgctgaatgaactctttccagggcctatggtccatccttcctgtccactccccagccacaactcttgggtccagaatgactttctccattgcatctcagtcctgccccacccagagagtgcccttctgctttggtagctccttaggcttgaaggctgcatccatgccaggcctctagttccaagattctgcagactggctgcagagttccagctgacatggtatggagacaaaggaagacccactggggtggagcccacaaccatcagggcctcagacattgggatggaaatctaaaatccagtagattgtatagattgccaagagtacaaaaaaccctgtgttgggtaatgcttatgaggacattttcagaaatctgccttagatgacataactcaactctcaggatccttcagctacagggatcttgtgttagtgatctctgacttaaccatctaagaaggcattgacacgttcttctgttccctggttaaaccagagttttctgtttggagtttacctgttacatatgggaatgatggagggcggaagg

SEQ ID NO: 64688 - DNA, 1173 bp, Bovine  19866881815967
  misc_feature (1)..(1): n is a, c, g, or t
ncaattagcatgataatgttgttaaaatctcatctacccagagggcactttatctgacaaggtaaattacccgtaagccagctgagcggcctcaaaggatccaaagacatgtcacgaagtctggggagagagaagctttgccagagaaaggcacgctaccagccgcgtgaggttaacagccggcccaatcaaagcagaaacgtcagacaattatgcaaaccagactcaggaactcaaaaaaacatagccatttgagaactttgctatgagagcaagctgctcaagccagctgaatagagcccctggtcccacagaaagcagataacaaggaacacagcgcccaaccctgtcaagggcaagtggtaggaaccctggtacctcccagacggggtgagcccggcgttctgcacagtgacaggtagaggaacacacgtgatcatcgtcagtggaaaattctcctcggaaatggtctaagccagacacggttgagcatctcaagggcagagtttaatttgcaaagcagccatggcacacagagagaccctgacttggagccaggttggtactgaccatcagcagccaggagactgcccaactgcaatggacagttgtttgtggccgtgccatgcagacagacacaagcgtctcgtgttcaaagaactgcaaccttctcgttccccaaacacgctggaccagaggtcgcctcctacacagagattttcctggccatctatgtcagcaacagtgaatgcatcataagcttaacctctgggaagatagacaaccagctatcccagagagttgccttctcgtcaaaaaaaccctggaccttgactgaacaacagccatcattggtgaaaaggcaccatacccaccagcaacaccagggacagtgacactgtcacagaggaccccattcatccgattacagccccgtccccataggtggggttcccaggtggctcagatgggaaagaatctgcctgcaatgctggagacccgggttgaatccctgggttggggggagatcccctggagaagggaatggcaacccgctccagtatccttgcctgaagaattccatggataggagagcctagtgggctacagtccatgtgttgcaaggagttggacacgactgagcaactaacactttcactttccacgtaaatg

SEQ ID NO: 64689 - DNA, 867 bp, Bovine  19866881864367
  misc_feature (1)..(1): n is a, c, g, or t
naagctagtcgggataatcagaaacagttcacaaataaaataagccataagattctccatcttctctgggtaccctcccccatccggtgacatcactcgacatgtggccatacggtttttccaggacatccccccctcccaaggctggaatctggcggccggctaaaattaccacttaaagcaaggattgacccttccttgacacttctgaagaaggatccatgtgaaaatctaccctcgctcctgggacgggccagagggaaagcctctgctttcattcggtaaaagattaaaaaaggaaaaaaaatcctaaatgaataaagagatgccatttttaattgttctagaagtctggcatggctatattaagacaattgctcttttatatgtagaacaggggcaaacaaatctccagggattaaaaaccatgttcttgtggtttgcttttaaaagctgcaaatttgaattcaattaaaaaaaaaatcatggcacagggacaaaatgagaatgaacaaagctggggaaaacgtccgtccccagtcttcagagcgaaggaccgctgtgagtctgcatgtttccaattacacatgttcagacagaaccaacgtgcggggtgttaagcagaacctgatccagagaaagattcccagagtcactctttcatttgaaacaaccacatagacacttcagttcattaaagagaaaaatatgttaaaaaagaaaaaagaaaagaaaaatattatcatatgatttctctctttctcctctcaatacaaagccagcctaggcgcatcagtgtaagaactaatattttgtattttcttgggtgcttttaaaacaatagtaaggagcaaagagaagaagcat

SEQ ID NO: 64690 - DNA, 725 bp, Bovine  19866881970082
  misc_feature (1)..(1): n is a, c, g, or t
nagtatatgagccgccttcaaaatccactgtgatattaagctgcatgatgacaggctctaggcaagtctgaacaacaaaaatagtaagagggacccgttgtattctgaagaactgataatccctaaataaatgtgtctgcaatgtgagtcagatctgaggagatataggatttcagaggtgtgcatgtgtgttctgaatcacaaaatgattcccacagtacacgctggactgaatgatgctttgagcaccagcatgactatttatcttgcaaactggacaccgagctgctagtcttcacacaaacgaagagttagtcactgctgcacccgccagtccagccagtgattaaggaaggctaattcacgttgccgctcttggtgacaacgtaaaacctggattagcattgtaaagcccaggaatgtgacagaagcaacacgtgaataatcattaaaaccgggtatttatgttatgtccatttgaaactgctcccctcaggctgggactcgaacccagtcaaagcccagattaggatttgaacccctttcgttgagatcacacacctggtcccaggacttaatgaggctcaggttctttttacgttctttatgttcttcaggttctttatgcacagaaggaattccgtgaaagccaaagtgataggtaagaagtgaatttattgagagaggtacacattccatagacagaattcagtccatctaaaagg

SEQ ID NO: 64691 - DNA, 968 bp, Bovine  19866880449385
  misc_feature (1)..(1): n is a, c, g, or t
nagagaaaggcccagattatctgggggagaaagtctgttcattgctggatgtaaaagatcagatcaaaggttaaaggacagagttagatacatggagacataaaattatatgagtgatacccatgaaagttgatgagctgaacaagggactgagaagacagaagcaaatggtcagtaaaagagcactggggcacctgagatcctacagattcaaactgacaagagttaaagggactcaaaatgaggtagacaggaaaaagcaaatcaatgaacaaataatatcgtaaactataaataagtaacaaaacctcacaaaagtgaaaaagtatttccctacaaattagtaatgttactatagtccaacagactttatacttagaatgaattaataataaatatgcattagaaactgccattaaatttaccagtaagataggatgttcttctgtcccaagatatgcttttccataagcagtttcatttaatatcataagtgagaagaaaatccaaattttaaaatataatcaagtaaattggcatatagtacaggaaatcctctaatattatctcaagttttaaataagtaatatactattttgccatttaaaatgttatgtaattttgtggataaaatgaagccagccataaaagagttaagtgaatgaaaattaaaacactaagctcacaaggctcatgggaatacacttcataataaaattttatgagattcttagcaaggaaaatagtttttaatatttatttgcacttaaaaatttgtttacactggaaatatatattagcatgttaaaaatattatttgcatggccatataagatcaatttgataatttaaagtagaatgaatatagcccgattagagtttccagtgatgataacttgatacatacacataaaagagacaacttttatacgaagagttagatacactaaacaggatttttaggattc

SEQ ID NO: 64692 - DNA, 788 bp, Bovine  19866880501882
  misc_feature (1)..(1): n is a, c, g, or t
ntttaagacagctttggaaggattcattttagttgtctaaccaaaacaaagctgaaagaaaaatgtacattctaatggatctgtgcttctcaatatctacatttagagacatatacccatcacttttgcatagcaacaactgggcatatgtgtgtaacatacctggtgttcaattaaatgccctcaataatatagagcaactacagaggcaaacagcactataaatggaagaattatataaataatttttgctaaataaaatgcatatgttgaaacattcatatgaatatgcatatatgcaaaacacatatgctggtatgcattgccccaaaatagttttcaacatttgccatgagtataattagcaccccaattttaccaccatactacccagtttggtttattctgtgtgagggttttttgacctgagcactattcatattctggaccagaaaattctttgttgtggggactcacttgtgagttgtaagatgttcaggaccacccctgacctttgcctgcaaatgagaataatattcttccctcagttgtgacaaccaaacacttcatcagacattgccaaatgtccccaggtagggggtactttggggattcccaggtggctccgtgataaagaatccgcctgccaatgcaggagacacagattccacccctgggtcaggaagatcccctggagaaggaaatggaacaatctccagtattcttgcctgggaaatcccattggcagagaagcccagtgggctacagtccctggggtttcaaaggaa

SEQ ID NO: 64693 - DNA, 1018 bp, Bovine  19866880701217
  misc_feature (1)..(1): n is a, c, g, or t
ngtgtattggagaagagagagaaacagatggtggaggtttaatactggcaatgtggtaagtattgctatgatggggataaagtcaagatgagaactctccaggaaatggcatcaaatccagtctgagaggaatgagaaaatcatcccagagaagatacactatgctgacacctgaagggtggatgagagatgattatgtaacaagggcatgagacagccagtcttccaaagcaaacaactcagcctaagttttcactcctgtaataagaaagtaaagatacaaatatttgtttgtgtagtttaaaagtcaaagactaagcataagaaaggtttagctgtcttcttatggagtcatttttctctaacactagacaagattaaaaatgttatggatgtggatatggagaagtagtggtgtgaatccaggcagctggagtctcagtctgagtaagcaccatttagaaagatcaccagtgtgccagctagaggcatgtaagcattttattatttgctttctagccaactaaagaagtatttgatgactgtaaactattcaactatggatctttctgtctggaaagaaacttgtctgagttctgatgtctccttttcatgtagagattattcctcaatgacccaggaggtatacatattcttctaatgtaaagggaggaattctagacttttatagaattggagataagatgaaaagaaggaatgtgttctgtacgaagagcatcaacaagaataagaacagactcatgtaaactggggacagtagaagaatgaaccagagcttttgatggaacttctaagaatctctcagaatgatagacttgcacttcgtgttggttacaaactttggttcagagatggagataatgcatatttagccatgacataatagatggtttacctggatcaaggttcctagatatcccaaactgataaaagggtgattcaagatttattctgtgctctgaactagacaaatgagcaagaaacagaacaggcatat

SEQ ID NO: 64694 - DNA, 1646 bp, Bovine  19866880795466
  misc_feature (1)..(1): n is a, c, g, or t
nttcatgtccaggtctaattattgcttcctgagctgcatacaggtttctcaagaggcaggtcaggtggtctggtaaaatcaactatactcaaaaaaataccaataattaaaaaaaaataaaatactcaagctaaatatttacaacaatttatgtaatccaaatgtattattataatatttcagtgtacctttgactgtgttgtacaacaatatcaatactgttaagtaaggaaatcagtcctgaatattcattggaaggactgatgctgaagctgaaactccaaaactttggccacctgatgcgaagaactgactccttgtaaaagaccctgatgttgggaaagtatgaaggttagaggagaaggggacagcagagggtgagatggttggatggcatcacccaacttaatggacacgagtttgagcaagctccgggagttggtgatggacaggggagcctggagtgttgcagtctatgggctttcaaagaatcggaaactactaagcaactgaactgaactgaagttataattcactggctcctgcagattatgggggtttcccaggtggtgctagtggtgaagaacccacatgccaatgcaagagactaagagatgcaggtttgatccctgggtcatgaagaccccctggagaagggtatggcaacccactccagttttcttgcctgtagaatcccatggacggaggagcctggtggaccacagtccatagtgtcccaaggaataagacatggctaaagcaacttagcacacactgcacatttactatctagttagacataacttctgaaacacttatgctaagtgctatgttaattctcaaaacttgaaaaatgtggagttagattcaagtgttaaaatctaaagccataaatttgctggcatttatctttaattgaataatttatcataatccatataaagcatagagcatataaaattttaacagatgctttagattgacaactttactactttcacatacttctgttgctggtctatgtccatatgcctattcaaaaaatacatatagttaactgcagtgtgatcctttcgtccaaaactaaataatttcaaattagccactctaaaaatgtaatagtatatgataatatcctcaagagtcaattttcaccattgtcatatctttcaatagttagttgttagaaggtttaactgtttctgtcagtgtttttaattagtcatatttattatatatagatttataatccatacagaatatagcaatagctactaaaatgacttcaccttttggttaatttaataacatgcatgttccagaaaaggttttaaaaacgtttgttcagagaatttggtcctttactttgctgtgttttcatcatggataaatgcaaaattggagaatatgaaacagactgctcaatcgatattttgtagacgtctgttgcataaatgttaaatctcttcttgtaggtgctaaaatgatgtaaagagatataaataaatgaataaattcattttcatgcatgcctacaactgtctccacacaactcattctactgcttcttttagtagttaatttactaatgaagtgtgaatctttgaaagctgtgttttttatattctgctaatgtagttttattc

SEQ ID NO: 64695 - DNA, 2763 bp, Bovine  19866880925092
  misc_feature (1)..(1): n is a, c, g, or t
naagacacatcccattttaaagatctctagagggtgactttgatccttgacttctggctttcaatctaccattttactaatattttcctgaagcaagtcaaatcataagttgaaaccttccaaatggattccacaaggctgagagttatctgcctttttttggccttctttttgcctcctttgacctgccctccttgaagcctgctggacacagatttaggaataacactttggtttgatattaggtcaaaagccagggcaaagtttgagcggaaaatagctgtcaaggcagaaggatggggcaaagcacaattgcacagacaggatcaaaggaaagccttgacccttaggcagcagtaaaggcagaagttgggccagaaattcttgctactgatggggattaattactagctcccaccaaattcaggatttgaagatgggactgtgagattcatatcactgatggtaacagtggcttctgacacaatctctgccaggtgacactatgcctctacaggcttatttttggataactacaagcttatggtaaggagcgccagacaactgatgtttcaaattacagagttagagaaactcttgagagtcctttggactgcaagaagatcaaatctttaatcctaaaggaaataaatcctgaatattcattggaaggactgatgctaaagctgaagctccaatactttgaccacctgataaaaagagcagacttactggtaaagatggtaaggctgggaaagattgaaggcaggagaagggaggtgacagaggatgagatgattggatggcattaccccctcaatggacatgagtttgagcaaactcccaagagatagtgaaggatagggaagcctggtgtgctgcagtccatggagatgcaaaagacttcaacttcacttagtgactgaacaaaacaacaagggtaaggagatgcttttacaaacaataatgataccacaataatttatacagtatgtttacatcatctcaggtcatctttatcctcacaagtccatgaagtacacagggcaagaatgattgtagatctcatttttcacttatggaatgtaagagtaggggaggtgaaaagatttggcgtgcatatttggttgctaaacggtaaagttcaggttcaaaatgttgtgtcttgaatcccaatggcattttcattccactataccatatcaatctaagtaattcagttctccaagtgaactgaaaggaaatggaaagctaaatgtaatatttcaaggagatatagaacagatccaaacatatgaatccagagatagagctcagattgtaaataaccagtcttgtcaagatatgaagccattccaaactctaaactgagatatgacttaaatgtcatatttgaataacagtcctgtgatccatcatctgtcataagttttaagatccaattttatagaaaatgaaaacaaacagattaatcctttttttcatgccaacatacaaaaactatgtaatatcctatgattctttgagaatcaggacctaaagtttccagtgaatatattttaaaacattttcgtttattggtgcctgacacttcagagcattacagagctatatctgtaattaaatattaatatgaaaataatatcaaaacaaatatttaaacctttatcttaaataaaaatatctaatgccatgctatttgtagaaatcttactacttgttaacttataaaaaataaattcttcaagaaattaaatacaggcactttttcctaatagctattctgtatttctgagaagcagtgcttgcatgcatttattctgacttcaaacactccaactaccactaggttgtcatcgaatttggttaactaattctatcagtaaaatagaacaaaataacattcatttataatttaaaggtctgagttgaagtggagatgaaaagacctcttgacatcttttccttttctccttttctattttaacatatttcttacactcatgagatgattgttctgttctcacactaaatctaataagtaatgaaatttccaatatcacatttgttatcaagtctttatttatttattttcctgaaagcctaactatgtcatatgttggttaatgtaatgatatttggctagaaatcaaaatatccaaagtccactcattcaaaattaaaattgggagggggataacaaaatctatacttaataaaatatacaactcagaaaaatctgagtcactaaagtctgcatataatttaataatagtaatagacatcatttctaacactaagattttgcttttactgatggctgcttagtatgactggtttagcatacagaaatatatgaatctcaatctctttcaatattgtatagatctggaaaaacattatactttatgattgtatagtactgtgcttgtatagttcatctttctgtcttcttcacatttctctcaatatctttgttaaaaattaaatatgtattgaaaattagaatatctttgttgttaagtctactggatagttgtatgttaagctggtgggtttgctaattcatatacaaacatggtatatctgtttcttcaataaatatgatatatgccaggtcagaagatacatattaacttttcctgagtacattttaaattcaactaaatagtcaggaattattccaaaagataaatacaaaaggactctgaaagctagaaagacaaatgtgcttgactagtgactttaaaagtcaaggagtaa

SEQ ID NO: 64696 - DNA, 2000 bp, Bovine  19866880963250
  misc_feature (1)..(1): n is a, c, g, or t
ntttccttctccaggggatcttcccgacctaggaattgaacccaggtctcctgcattgcaggcagattctttactgactgagctataagggaagcccaggagattactaggggatctcaaaaagtcgaacacgactgagcaactgaacttaactgaggggattaaaaggattttctgtgtcctgcgttggctggtgtgcccagagcagagttcctggcaaagctttggaggatgggcgtgtaatagcattagtcaggttcttgtgaattctggaaaagaaagatgtagctctccacaccaggcttcacagatcatatttacttgctttcacttgtgtttattcaaaaagttttttaatacctaccagtgtgccagagactattagggcagggtctctatcctcaggaagcttactgtataataggaaacagctatcaacaatacaaaaataaaattaaaactgtgacaagcgctaaacattaggcatactaactagatactaaatttacagggttatttgaattactagaaggactgaaaagcaaggatgaataagttaccaaggaagggtaaagcattcctgcaggggggagccacatatgcaaaggtgtgtggcaagtgcaagggagtgaaagaagtccagtatgtctggtgttcagagagtagtgagagcttgatgtaagtcaggctgtcctaattgggggaagccaagacaagcaaaggacatcttttttgggtgttagttctaaaaggtcttgtaggtcttcatagaaccgttcaacttgagtttcttcagcgttactgattggggcatagacttggattactgtaatattgaatggtttgccttggaaacgaacagagatcattctgtcgtttttgagattgcgtccaaggactgcatttcggactcttgttgaccatgacggctactccatttcttctgagggattcctgcccgcagtagtagatataatggtcaactgagtttaattcacccattccagtccattttagttcgatgattcctagaatgtccacgttcagtcttgccatctcctgtttgaccactttcaatttgccttgattcatggacctaacattccaggttcctatgcaatactgctctttacagtattggaccttgcttctatcgccagtcacatccacaactgggtattgtttttgctttggctccatcccttcattctttctggaattgtttctccacagatctccaggggcatattgggcacctactgacctgggggagttcctctttcagtatcctatcattttgccttttcatactgttcatggggttataaattgttataactcttttcaaatgaacaattaaaatttcttttcaaatgaacaattaaaatttgttttttaaaacaatttttaaaaatcctttaaaaaatttcttccaacagttagttccatatgataaaatcaatttaagtgaaaaatttagaatgggtgagttagctaatggaccctttacagtaaagggtaaagggaatctatttaaaatatgtggaaaagaaatatcttttgcttctgtcctattcttattgtcagatcttgtatatttatttaaaaccttgattaaatactttttaaaatgtgcatcagagagtctcctcaacaacagatggtaatataatttatctaaacactgaagtagaaacaaaatcagttttatcagattttataaatttgatgaatttcagtaatccttatgctggcaaattatctcccagacttatctactactttgttattatcataaaatcattctactaaaactagcacatggaaaacatgtattgtagcaacagagaaacaagtcctttgtaaatatgaactcaagggagtagtcaatattcagcatgctttgtggtgtttaagttattaaaatagaggattttcagagaagcacagattacaggtgaggtaatagaggaagacataaataataaaaataaaataat

SEQ ID NO: 64697 - DNA, 1083 bp, Bovine  19866881171868
  misc_feature (1)..(1): n is a, c, g, or t
nctcccatcattgtcaacatagaaaatcaaacttggccattggtatcattttatgttttcctcccctttaagttagctacctctgtgaaaaagcatcatcactatgttttatggcatattcctctaacaaggtccattaaatgaatgccttattaactgaagaaatgggttgagctgtactaggttaatttatcttcaggaagtctgaaatttaacctataacagaaggcttgaaagaaaccagtgatgattggttcctgaaacagagcattagactatagaactaattctcttccaacatcacatcctgcctctctcctctcaacaaggtacatacaagatctagtctggacctctaactcttgattcagaattatgtattttctctgataagtccactgaaacagaggcagataattactgcataaggaaagccccctgctttgaaaaatctgtgggtgatcccagagtggaaaataaaggttccaaaacacagtcagagcctgtaggattttttttttttggctgcataataaaatctttctgtgatctgtctctctcagctcgaagcagtgatgccatcacctgagcaaaccaaaaaccagaataattttagctaagattttcactttagtatttctacatttttagcagggaaatagcaaggagatgtactcttgattaatctgaagttctttaaatacagcaggcatggatataaggaaatactttaataattagccaatacaattttatctttcacctgttacatgactgattttcctagtcccacatctgcgcgcaccacacacacacactcacatgcaaacgtgcatagggcataattttacctgctttttaagacatgaacgttaacacgaaataattgttatttccaaactcaaacaagtcaggctcaggaagttaagaaatgaatcagagttaacaaacaaaagggcatgtactaaataaagtgttttgctgagcacaggagcctacctaattccttttcatgcatcatttatagtgccctttaaaagaaaaaagtttcatcttaagctttaataagcatttatggaagca

SEQ ID NO: 64698 - DNA, 1541 bp, Bovine  19866881331906
  misc_feature (1)..(1): n is a, c, g, or t
natcaaaaatagaagcatattactgaatatttacagacatgaaggttactaatcctcaaccctcaaaatatagaacattttgttctctcatagaagttttgtctctgggtaaattggggcttagatacttttccatataagggctactattgtattttgtctttgacatgtattattttgatttcttaaaatcttaaatggttattttgttgcctagcgctctttggtgtcatcatgctaaagccaggcagctgtgatagtcacagccactatcacttgaagaacacagatgccacacacgtacacgcacgcacgcacacacacacacacacacacacacacacacacactggcagattattagtggcagtttctcccaactgtacccatgccctgggtttctgagcagactgctgtaatcatcctcttttaggagaggataagagattagtggtttacaactgttttagttcacattttagttttgaaaagtaaatgggtatctttagtggtttaaatgaatcgttaaacacacatttatgtattttatgaactaaataccttctaatccaaaatatttcttaattctaacagagaattacatattttgcacagatgtaaaataatttgagcagcttcagattattatatttttctcctaaggtcaataaaaagcttagtacttagccatagtcagctcaagtccactataatgacagtcccctagtaaccaaaataacacaaaataattacagattctagccaagacagtcttatttttaacctatgaatgtcaagacataaactggtttttagctctttggaaaccatgcctttacttttctgtttttggtagaagaatcactagaaaggcttttgctctctagagatcactgacttgcaatttatagtgatctatataattcttgggtagctcacctggtaaaaaaaaaattgctgcaatggggggtacctgggtttgagccctagtttgggatgatcccctggaagagggcatggcaacccactccagtattcttgcctagaaaatctcaattgacagaagagcctggtgggctccactccacagggttgcaatgagtcagacacatccgactaagtacacagataattttaaaagatcttgggccagaaaaaggtaaaagagttttgtaacaaaaatgtactgtgactttaccatacttgatcatctagaaaagatatgatatgatcaaaatatgttacatgtcttcaactaattgtggcaagtgtttttgcatttcatcaaaggacaataaaaacccttttctaaaacaatagtaaataaaattgcttttcctattcaggggtttaaggcataactaagtcttttaataacaagggttgtatggtatgctgaaacttccagatctataatatctatgcatttttactaatttttctacaatcatgttaaagaacatactggtatgtgggatgttcttcagtgtactgtgatggcatcagagtctgtttatgtgatatttcttttaaatatattt

SEQ ID NO: 64699 - DNA, 993 bp, Bovine  19866881390661
  misc_feature (1)..(1): n is a, c, g, or t
nttataaatgtggtaagtattatataaaccacaagttgtaacacaatgaattagagttaacttcgttgacctctagaagtttttatagcaggaagtgttcaatcttgacacatttgtggtggaaaaagtaaacagagtttcagacagtatattaggaggttgaatcaaaatgacattgattaatagtgtccccaagactttattaataatgtagcaattgcaggacatacctagctccctcagcatggaaagtagagttatatatgcacgaagggcaagagatgattaaacttgtcttgtcaggttaagtccagaaaaatattcccacctggtacagttcaaataatagactaaatttctgagactgagcaaaggaatgatacaggggtaaaagtaggggcattaagaacaatgtggatgtggatgatggagcttgttttgagtaaattcagtatcatgattttttttataagagatttaaatcatgagttctcagtagggaagaatgctattattaatgcaaagaagtattgtgtttgttgttttaaattgttatccggtaaaaataaaaagtgttagaagtgcaacagtagcatattatattaaacacacacacagagatataaaccaacttaatataaatggaatacagtaagccgatttgaataggcaagtgagagtatgaaatagttactgttgattttctttcgaaaaaaaaatacttttggaaaggaaaattattggttttagtccaatggtctgatggtgtcacagacagaaagcagaaaatgcagaaagaaagaagggagccatataatttcatacagtttttatctttggttagaaatttgcaaaggtggcttttaagtaaaagaaaagtgtccattaaagaacagtgtaaatgactaggcatctaaacaaatctttcctaaagacatttcacagagatttaaaaggaataaatattaacttagaaaaaatttcacgaaaaag

SEQ ID NO: 64700 - DNA, 683 bp, Bovine  19866881401043
  misc_feature (1)..(1): n is a, c, g, or t
ncaggtacttggtaaataatgatttgaactacacttggcaggaaattgtcttctgttatagtttccttattatgttatgtattaagaaattaaaaccaaaatgaactaatctatcttgatctcctcatggtctctgcttaaggttcattcttattcttctcctgtttcctgacttcctattcttttaatcctagaattgctttaatctcagtttctgagactctcgattctgcccattcatttaaatttgtaaacatcctcctggcctcactgtgtttctgccaaaccacagaactctgatccaatatgtcattatgttcctatttgcaccctggaatgtcacccttttcaccatctgccacactccttcttgataacttttacatccctgataaacacaaccatccactgctagagattctgctttcaaattcacaaatttgctgttaaatagttatagccatcataaatgaccctaacaaggatagagggtaacactgagtatgttctcaatggagatgaataatcggtttattaaaattaatatttcatcagatgctatagagtagctattctaagctcattttgccattttctcttgagcctcaatcccccatgcacagtaggaaaatatctatttctgaaaagaagctcctatctattatcaacatattaaaaccaca

SEQ ID NO: 64701 - DNA, 1782 bp, Bovine  19866881537113
  misc_feature (1)..(1): n is a, c, g, or t
natttaagaaaatactgtggatgttctcagctagaaatatagcaatgctattcatagaaatattaactgaactttgatgttataattcattgtgtgaattatatgcagtttaaaagcatttgctaatatttaaatgataaaaagtttttaaattatcttaatgtacaatatctttcttattgaagacctctgctgaaatattactcctataatgtctattcaaacaaaattcaatcattttagttttacaagtgagatttattagtgtatctcaattaaaaatcagggcctacttactgattaaatctatattgccatttagagtgtaaagtttcataatttttcaagaaagagaatattccatcacaaggtttgttttttttttttttttaatttagcaatctggaagatatttgtttttccaaattataaaattaacattcctgtaataaataagtgtccattttgtggaaattttaataaataatttgaatctcaaattttactgtagtatttttaaaattttaatattgaaatataatggcaagcagttaattcttagttttgtttttttttaattccctgtggaaataaggaagacaactgtgatttactggtagtttcttttacaattttattctgtataggtaacaaaacattgatttagtataatgacagcaagggttatgcttttaataagtattgctcattaatttttcttcaataattaagtctcttagaacataataaaatatccctatttataccaagtagagaaaaactgcagataaacatgattttagcaacacctgggacattggagagaagaaaatggtcataaccaaactaagtattaaattatagataggcaattttcagagaacaccatgtaaggttggaatataatattatcttaaatttttccatctttgtctacagctgcactccaattctgacaaaggtgatgggtctgtcaagtacatccttactggagaaggtgctgggactatttttatcattgatgataccactggcgacatccactcaacaaaaagcctagacagggagcagaagacccactatgtacttcacgcacaggctattgacagacgaacaaacaagccccttgagcctgaatctgagtttatcatcaaagtgcaagacatcaatgacaatgctccaaagttcacagatggaccatacattgtaactgtgcctgaaatgtcggatatgggtaagataaatcatttttatattttggaagttaatatatttttgaagatataaaataatattttgaagactaatatttaaatatttggggggtgtgaagaaatttgaagaaattccaaatattttaataattgcctatagcctaaagttttcaggaatatttctgctagctgtcctagtatttattaaaacaaatttctggagttgttagtgtaagtaacaacttgatctcaaggaaaaaccattcatacatgataaaatacttgcaattcttgcttaattggtgtaatttttttttttttttttaccataccaacacaattagtgacagtttgtgtcaacacatacagtagaatgttggaaatctattgctatgtgttttcaactttcaagttatgattaaattataataggactgatagtccaagcaatagttatattaatcaacaaaatttgcagaaacccttaagcatttgcatccctttattttaaaatatatgataaccatgtgaaatattttaaatgccacattaaagctatacaaactga

SEQ ID NO: 64702 - DNA, 829 bp, Bovine  19866881602638
  misc_feature (1)..(1): n is a, c, g, or t
naaatgacctagttacattcacttaaactctgacttatctctataaaaggaaaacctgactcagcaaaatccatcagcaagatcaaagactccttcttccttctatcttcaggctgataagagggaatagtttctctatttctacaaaaacacaaacattccttattatctctattctaataattagcagacagatataacaacaatattacattttcttttgacaaacattccttcttatctctattctgataattagcagacagatataacaccaatattacattttcttttgttttaaatataaagttcattttgaaacaagtatcacagcctcattactatacttagccatttcatattatatactgcttctaatggtgaatttcagtagtctctttgaaagaaacataaatcttagaagtcagataaaattctttttggcttcatggttgggtttcaggaaagtgaaatgaagtaggttcgaagtcctctctggagaaaacggagcaacacagctgttaatcatgtttgcggcaagcagaaatgcaaagcctctaaaataatcaggagacttacatctaaatgagcataaagatgaaatagatagaggtgcataaaatattgcagggactttttactattatgttcattaaagttccagcttaatgcatgctttattgcccagaaattcatttcatttgcattttaactgggttttagtcaagttaatcctttttcttcccttgcaaagaaactattcagcaactacagcaaaatactgaaagaggagaaataaatggaatattctacttatactaaaatttta

SEQ ID NO: 64703 - DNA, 773 bp, Bovine  19866881743315
  misc_feature (1)..(1): n is a, c, g, or t
ngactgcagcaggccaggctttaagtatttaccaacattaattcatttatatcaataatttctagtgctgaaaaaaaaaaaagcaaaacaaataaaaaaactcaaacgaaaaactcttggtgtgcagcatatttagtaaaatccagtttcagtaatatctgttgtaaatgtttgggcacaatttaattcagtctaagtgtctttggactgcagccactgaaagccacaggggttctttacgagtaatctggacaagcttttgtcctcctcacagtgtttgagtattgcttgagcttctccatggaaataaatcatgcaacatagagcctgttgtgctgtgtccttaggagctctgcatgagcaaaaagaaagttgtgtaaataaatagtttcatctcaaaacaaacacaataaaatagaatcgatttaatagacatgaaatctcttataggcttagtggccaaattctctattcaaaggctcagattcacaataaagcagagtttagaaaaggcatgatgtttcctgtgtcagagacagggcagaggcttacaatatatttacatgcaatagaaaaaatgggtatatcatataaattattcagtattctagggataaatgtcttaagcatttcttcacccatatcagacttgtaatttttcccttgaaaaaaacttttttacacccagtcttgacaaaattgctgtccttcattagaaaacagctatcctgctgtggtattcatcaacatatgattttactaaaataatatgt

SEQ ID NO: 64704 - DNA, 1942 bp, Bovine  19866880886273
  misc_feature (1)..(1): n is a, c, g, or t
ncaaaaatggaaagataaggtgagagtgaattacaagcccttgcaatcaaatttgtggggttccccctataaaaatagaactctattaaaactcaaagcagaggaggactcatgaaggctgctgagttacaaggcaggtaaaccccataaagataaaatagtttactggttaacaaattaatccaggaaagaaaaaaggcaactaaatgaaagaagacactgttgcgtggtattattagtgattactattataagatggaataaaatggaagcagacaggaaggtcagagaaaagaaatggtttacaaaatatttctcagaaatttagaaacaggaagattttgaatcaacccctctgtattatcacagtcttcaaagaattacaaaaaggacgttagaaacaataatcagcaaagtggaaatcatttccagccaacgggaagaaacagaaaacaggtttgcggatgagggtaaagccaaaaacccaagaaattccataaattgtgctttaaaacaagagagggccctgaagattggcagagtaggaatactcttcaaggtacaggtaaatgtgaaggaagtgaaaaataaaatagaaggaaaagaagaagaaaatgagaaaaattttcataacaattgaagatgtatcatagaaacaactcaacaaaacctgaaagacagacccaaataagggggcacctggagggctaccctggtggctcaggtggtaaaaaatctgcctgcaaagcaggagacccgggtttgatccctgggttgggaagattccctggaggagggcaatgcaactcactccactattcttgcctggagaattccatggacagaggagcctggcgggctacatacagtccatggggtcacaaagaactggagacgactgaagcaaccaacacacacacacacacacacacacacacacacacacacacacacacagataattagtggccagaaatgcttgaagtccatgtgggaagaaaagatcttaacaatatatggaagaagaaaaatgttagcctgtatagctcaacttaaaaaaatagtaccaaatttagcaacagccactccaggcaaaagcaaaatatatggtcgctgagtttaatactccaaccaaaataagagcccaggcccagattttgtttccagccaacatgtgtctttacatttaaggagaagagaagatgtttgcccacctagaaaggccacaacaattaatcattcttggtgctgaaacaaaacattcagaggtcagaaaaatgtgttattctcttatctcaggtggggttaagatatggactgtgttaggttgggcaaccacccatccgggttatgctgggactgaaatgtcctctagcgtgagacacttgctgtgctgcagataagacagccctgagcagactgggaaggtccatcaccctagcactagtttccgtcacatgacaacctaggcaggctaattaggcttgacagtaaaattaacacagagaattctcgaaactcttcaggtactgaattttcaagtttgttgttttcttctgtcatctaggaaaatgttcctagaatagttagcatttgatcatttattcattcacccagttaaatagtgattgtgggctttttcatgccttgggctgggtgtgcagttccagtggaagcacatttctgacttcatggggcttagaggaaaagcaggaaagctgggtgtgaaatacataaacatgaaggtatgtgtaattggaaatgtgatagaaggtgtgaaggaaaaggacagcatgatatgattgaaagtgatcgaagatgtcatttagactggaggaggggcattctgggtgggaatgaccctctgaagaagggacaggaaagcagagacctgagggatgagaggagagaggaggcagataaggataagctgcagtgggga

SEQ ID NO: 64705 - DNA, 897 bp, Bovine  19866880924570
  misc_feature (1)..(1): n is a, c, g, or t
natggaaaactggcaggtcaccctccttgttctgggcaccgtattactggcatacaatgccatctatttttgtcacctttttgtcattccaaaacagctgtacaaaagatcttatattttactttattgttgcttattattaagtgaatatgaaagttaatataaagtgtcaagatagcatgttaaagtattttaatatgcttttgtttttcccacaccttgtacattatattttctcttttcagccagaggatcattgccttgaagaaagtaaagattgttaaagctggattgccaagagaaagatgtcagttcaaacttaaacttccaaacaatgatctgaaagttgtaagaatcaagagtttcgttttcaaaaacgatgttttgggggagatgaaaagatatatgggctccaaagagccaaatttagaaggctcagtttttagtgtttaacataaaccagtaagcagataagaatgcaggatgtgaatgagagtaggaaatagcatggccttttcagcagctctgagtcctccactggatctcagaaacatctcaatttcttccaaagcatatgcaggcaaggagagcttggaggggcggtgcagcgctgtcctcaggtcctctctgctttcacacatcacgccttcacacctacacacacatctcaaaagacctactaggtcacttctcctagcgtacctgatggtaactgggcacctctcccacccaccccaacatcctggagttacaaacctctctgggattctccatcatccatgatttttaacgaaatcatgttaaatatctaatttaagtatgtatacattttaaaagcacacagagcatacttgtactgcggatggattttcacatgcagacagatcagtaaacaga

SEQ ID NO: 64706 - DNA, 1481 bp, Bovine  19866880428074
  misc_feature (1)..(1): n is a, c, g, or t
ntaattaagaagccataaacttgtgtggaatattaatcctgccccctgccctccccagtctcacaaatcctgtgtttgaggttcattttcttgactttctgttttgttatggccccatccatctaactttagagaaaaggagccgaattaaacttgacatgttttctgaaaatgtgtttttgatgattttgttcatcagaatacatacctatgcgaggacttggaacaaggggaaaacaccagtttaattttcccgaatagctagttggcttctatgggtagaatatggaggtctatatatgtcgtcttgagtcctgctggagaactcctagcaatgttagaggctcatctctgaaggaactcccaggcatcacagtgttccctgcctttgacttcagtcatcctatttctcgggccttactttcctgtgtcattttgcttgaatcttcttgtgatgtttccggatttgtaagttaaccttgcattctttttggaacacggctagctataaataatgaagaagttgtgaacagaatgctttagagagactctgtgttgttgtggaatgagtgtgggctttgaagtgacatagatttggatcggctctcaggtctgtttcttgtgagttctgtgaccttcatgtttcttaaattaatgtgacaccttccagtgatgtcataactgcgaatgaaccccctccttttagtccccagtgctatcttctgtttgtgtgttttctacccgtgtgttgctttccagtacagttctcttacgctggcaaatgaggtgaggcagtcttacatggttttcacctagaaatgaataccaacaagaaaagccatctagaaatccaggaaagagctatattctctaagaaaactaggactgagcttcagattcccttgtttagattatggtaaattgtacatccatgactgaagtgacttagcacacatacacacaaagtatacatctctaaacctttaattctttattccgcaacaaaatttcaaatctgttctgctgcttgatttgtgctacttattttatggtttcaatcagaaacacaagacaaagcacttaatttttttgactaccatcaatatttacccctgttaataaaaacagaactacttctcagtgatacatcaaagggatagtgtctatccttgaaacaaacaaagcacatatcagagcctaacaagtctcttctatctaatgaatgaatttacagtttcaaagaagaataaacctgtcaaagggaattaaatgatatgttgcagcaggaataacttctgtgtctggcatttctggtagattgttagtaagaggaaaataggacatgtggaccttgataataaacctgtctttgatattattgttaagcctgactcctggagattaaagtggcaggtagtaaaatgtatcatgccaacgtaaatgggatgtttttgttctattttaagtttcttgtggaaaat

SEQ ID NO: 64707 - DNA, 2252 bp, Bovine  19866880428490
  misc_feature (1)..(1): n is a, c, g, or t
nagagttggactgtgaagaaggctgatcaccaaagaattgatgcttttgaactgtggtgttggagaagactctggagagtcccttggactgcaaggagatccaaccagtccattctgaagaagatcagccctgggatttctttggagggaatgatgctgaagctgaaactccagtactttggctacctcatgcgaagagttgactcattggaaaagactctgatgctgggaggaattgggggcaggaggagaaggggatgacagaggatgagatggctggatggcatcactgatttgatggacgtgagtctgggtaaaccctgggagttggtgatggacagggaggcctggcgtgctgcgactcatggggtagcgaagagtcggacatgactgagtgactgaactgaactgatattcttctacttctctgtacattcatcctattaatttctgagagtctgatattgaaactccaactaaaacttcttaatttatctacataaaacaaataattgtaaaatatagtggaactatatgtaaccttgttctatattttccaagtctcctgtaaatgtgttaccacactttcataatttaaaagaataaaactttttttaaaaaattgggggaaaaaaggaacatgcccaaggtcatacatctgttaaagaacagaggtatgattttcacccactgaattgggaaatatttaccctgattggataagtagacactggagcatttgctctgaaataagacactagatattaataacatccttaaaatttataaaatgtacctcatgtatactttgtatataaataattaccatatgtttataagctcatatttttaaaataatgctaatgcccacttcaccatctttttctccaataccccttctaatacagggaggaaactaaaggttgcatagcacctgggtcagaccagagcttagaaacccaaaatggtaatgaccaagtgcgtcctgttatgtgcatagtcttcccctaagaattagctgtagtctttcctcactcagaagaatatgacaagtttttccacaaagagagtcaacatattttggttgaaacttcaccctgtcagagaggctgctctgccaccattagagcttttaagcaaggatgagataatcacaataattatcttccattagcaaaatgatctggcaccagattcttcctccggttctcacagcctcccttctggagtgaggagcatctgaaatgggcttcaagactatttgcagtggagaataatagagaagtataataatgagctagaggtaggtaaattaatcaaaggatcaggagggatgatggaccccaaatcagaaaaatctgctgatttgggctaatataacctagttttcatcttttcaaaggattctctttagactagccttttaattagtatgcttacatcatagcatcagtaaggcacaaaacatttggatgtatcaatccagcatttatccatctaattcatttcccctgtaagagtagtaaataaagctgataaaattatactcattgctttaattcaaggtttaatgtaaacacaaaaagtctcctatgggatttcaaaaagaattcataacctttgactaggtcttttctctcttttgctcagatataactagaccctgaaagaatttttccatttggtggctcttatttttaaaatcaccacctctatcaacaccacaactgtagtcagcatcatcattatcatcatcatttttaccatcaccattttctactgtgtaaggaatgctgttctgagttttttgaaggaagttgcaaagaaaattgaagcctatgcttgcccagacagtgtttgtaacaaaaggggggaaagtattattatattatcacattgatagaactgtcagtaaatgcaaatgacatacatcttaaaatagtcatctacaacattgacaaaaggaacgctagcaaaagacaggtctacaggtttcttagactcaccaggttgtctgttccaagaatgcagaggccacgtctgctttgtttatcactgtatacccaccaccacgtgcaacatctagcatttgctagggctccataactagtcattgaaatgcaagtcagggcacggttaaacagagggttagctacagtcattgaggtgaatatagttgtttctagaatttactatgcactgaaatcacctaggatctttaaaagttcttatgtctggccgatactcccaga

SEQ ID NO: 64708 - DNA, 1516 bp, Bovine  19866880480493
  misc_feature (1)..(1): n is a, c, g, or t
nttaaaaagtataatatgagtagccagcccacaattaatgaaggagtctcatttattttgtcttgaagttggttgttaggaatctgaaatttattttcccctagaaaaataaagcatagacaggttattaatttagactaccgtattttatttctttagagaatatagatgaatattaaatctatttttaaaaccctgttttctcattcacaagctacttctctgtagctctgtagaatacatttgcattttctagttttagataccatgcatatacctgttcccagtataacttctcccccttgcgctgagctaaagtggggggtagggggtcaccagaggtccaagtggtagcagtggccaaagcagagaaggaaggagaggaaatctccatggcaaccacagctcagctgggaggaccccttccccaagccttaaacatcttttgggtgaaggaatgaggattctaagtttcccaataagagcaggagttaagaaaactccagcagtctcttttgttgaggtgagcctataggagtggaagtatttgcatgaaagaaaggttaataactgagcatcattggttatctgatgatgtccaagttctgtgtcttactagttgtttatctatgtttagctccggacagaacgccaagcaaacactggggttttagtaaatactgaattattctgggagatgatccttggaagggtaaaagtaagtgactttggataggatctagctaaaataatcctgcttgaatttatatttcactctctagagggttgtgagtttccaaacatttgcaagcattgacatactgtggtatacatagagcaggggtggacactgtttctggaacacaaattcctacccccacatgctcaggatccaaaacagccatccaggaaataacagcagaggggacaagagcccacatttcagaatcaaacgggaacttgatttgaattatcgttctgggccacatggccaagtatctgttttctcaagccctccatttatttatgttataaaatggaaatgctgttagaaaaatttacggccaccttggatcatggtgaaggttaaatgagatattggatgtaaaagttgcccagtgcatggtaagcagttaataaatgctggcttacgagatttctcactttggggaaatgtaatctgatgggaaaatgagagccctcctacggacctgagaccagaggcacacctgggccaggagtggctttcagagcttgtctgtcaggtctgagctcccttaaatgcctgctcatagccattttggcagatcaggaggagggagggcgaggtgtgagcggcgagagtcacatttcctcctgtgggtttgtgtcgcctgccatgacttccacatccattgtgtttgtgctccaggctgctctattattagtttccgctgctggttctcctccagctgcgtgtccatcagggtccattgcagaatatcaatctgtcctcacgggcagaaaagccatgcgg

SEQ ID NO: 64709 - DNA, 859 bp, Bovine  19866880486356
  misc_feature (1)..(1): n is a, c, g, or t
nttcaggaaagggtgccagaaagaaccagtcgatttgaaacagcagttcacacatttcctgggctgttggagcgtgctgtacgtttcatttggcttgcactgccttcacctgtagaatatggctatcgaagggaaaacacacactggcaagcaatagtgcatgtagttttaagtggtgagactattcaagggaaatgattctattgtgagtaaagagtggtctgcagacaatgctaatcagcctaagttatcacagtaaattgtgtatgtataaacctttacatatttgtaaaatatcaattggaactgtatgaaattgatattccgctgtttctttttttttcttgacttgcaaaactggaatttcatatagttcagtctaacacttccacatttattattcctctttgaaaggccacctgccatggttggaagcacattggatttagagtcattggcttgggttcatgtcccaacaatgtcacttgtgtgctgggtgacctttacaaatccttcagagattgaacagtgacatgtgggaacaaagagaaatctaattcataagatatttagcagtgttttgactaatagttactagatagagagcctttttcacagtcatatgaaggcaggcagtcttataatacatacaaaaggctaacaaacaattcaaatgtgagtaattatgaatactgtttctgattatcaataggacattgtcaggttggaagggcaggcaccgttatcctcattgtatagttggagaaaatgaaacagaaattcagtaaaagggcttagatgattcagtgactcagaaatagggtctgagtctctagatgctattggcttttaagggtac

SEQ ID NO: 64710 - DNA, 1434 bp, Bovine  19866880502177
  misc_feature (1)..(1): n is a, c, g, or t
nctgtgacggttttaaagtcacccagggaagtcctaacaacttcctccacagactatctgccatgactgagaaagacgccatggaatggatatatggccacatatctcctctgagggattctgaaactaaggcttcctaacatcagctggcccatttaatctatctacttcttctttggcctttgaccaatatggtgtcattgtgctttcctaaactggtctttaatcactctgggtgaggaaaggacacttcttgggcaaatgggaacgcctttcccattctgtccaaggggccactgcctcttcaaccccgctagtggtcatggaggcagaagtgcagtcaatattgaaagtgattatgtcctaaggatatgctaatgacatcctaaagagtccaaggcaagacatgattagaagatgtgtctttcaacttccccactataaagtttaaatcaaatcaacatgtctggaaaattaattgttcatgtataagatacgctataagagtcattagaagccagtattgaaaagtagcacaatggatgatgcactcatgagtaaacagtactcagaaattgcaaaggcaaagaaatctatgtgtttcaataaaaacaggttctaagaagccataacactatgggtaaaaccatcattactaactgtcccagaggaaaagatgaaattagtcaagaatggtgcatttgataatgatgaaaaagaaggaatggttcttgagcctgaaaaaatggtacctggacaccaggaaatactgacaggtgtgctgatgtactttctaacttgctgccactgtaagatgctccaagctcatcttgaatatatactatattttaaaatgaaattgtttatatagatacgggtcttaaaaaaaatatttgtgtgggtctccacatacttgaggtcaagttgtaattcagggtctgcagctctaaggagaaccatggagaagacagtagcaatgcagaaacttgaagggaggagcaagatataattttctttctcacagttttactgcaaacaagtcctgctccagaaacctagtcagtcatatcaggaatcctttaaactttgcttcccagctgttttgggcttgctgataacatgccagttggtataaatattacatgatcccatatcccaatattattcatccgattatgtgagctagctcactgcaagatgactttggaattttaaataaagctatttttacagagaataatttggatatatctaggaaataataccatcatgcattgcaacaagatgtgatgttggataacattgctgtatggatattttacttaccatgcaacatgtagcctgtcacgtatttttacgaattttaagccttttataaaatatgtgtctatactacccccacagttgatcaccctcttgctttttagaattata

SEQ ID NO: 64711 - DNA, 2141 bp, Bovine  19866880538388
  misc_feature (1)..(1): n is a, c, g, or t
ngttgcttcctgtcttggctattataaacagtgctgcgatgaacattggggtacacgtgtctctttcccttctggtttcctcagtgtgtatgcccaacagtggggttgctggatcataaggcagttctatttccagttttttaaggaatctccacactgttctccatagtggctgtactagtttgcattcccaccaacagtgtaaaagggttcccttttctccacaccctctccagcatttattatttgtagacttttggatcgcagccattctgactggtgtgaaatggtacctcatagtggttttgatttgcatttctctgataatgagtgatgttgagcatcttttcatgtgtttgttagccatctgtatgtcaagttacatttgggcactggtataaagcaagaactcttaaaaaatcaatcctctaagtagactgaggaagaaattaaagtgcgttttcttcacacctaaatagaatgaggcgacaataataaagccgtgctgtgtatttacttagcacttcacatttccaaatggcgccactatttcattaccatattcgtgtgctccacctctaagctttgcagacagtctactgctaaaatgccataaaatgtattatgcagcaaatgggttatggtttaggtaaatttaggtaaattgctcatggtcttgactgaacagcagtgaacccaggggacccatcatttccacccttcagaaactaggaagacttgaaaagatcaactgaagaggtgtgaacagtggctaaacacttttcctctttttttttttttcaacaaaaagaataataaattttctttctactgattgagctcctattgctccgacaaagtgtgggagccagatgggagaggaaaattagattaaaaaaattaatatacattttctttcaggtttgattaagggtgtgcatcagagaaagcacacgtaaacatgccactctttttaatattttggcagagcagtgataaatatatttatataatctaatcacaggacagattgtaggtgggcttttattacaatgattaaataatagagacgcagagtacatatcgataagaaaagtcaaactcaaaagggaggagatatatcatccagaatttaggaacacattagtttaattttgagcatggtacttagcccctaatctcacctgttttctttcctctagttcaaatatatgttagagtgaaaaatggccttatttcaggtgaggcatatgggccattactggccatgcgtctgtgttcatagttccttcatcagtaattcctaggataagacacagttcccattaaaaggccctgtaggatctcagttggagttggggtttggatgttgacatttaagataacaaggtctgtggaagttttaagacagatgaatccagattctatagcagacttctgagagggatgacatagggtaggatttgtcaacagagaacttctgtcatctctgccggcatagaaactgacagagctctcagtaaatactttcatattaagtaaacagtatttcagttataaatgaatgaacagagtaataaatgaaaaagtataaagaaaggactgggggttatatgttttcctgggaaagaagggacagtatgcagtttattagggagattaaggcacgaacctggatttaagaggacagtgagacaaaaggtgtaagtaccacccttttctctttcatgtggctggtgctggtcatgctgagagcagagtcctcagtacaggaagtcccctccatccaaatacaaaccttcaagttgtcaactttcagagatgtgaatgtaagtgccagccctggggtgctggctgttgtactgtactactacacttttcgagatactgtaaggatgaaaatgtttcttttttgtttgtttttatgtatgtatgatttgtgtgaaaaaatattgtaaaactattatagtaccatactgtacagccgattgtgttagttgggtacctaggctgacttagttggacttactacgaacaaattggacttttgaacacactctcagaactcgttcgtatgtaggtgacttcctgtagaccccaatttgaaccacacacctcttctatctccttgcctttcatca

SEQ ID NO: 64712 - DNA, 934 bp, Bovine  19866880732915
  misc_feature (1)..(1): n is a, c, g, or t
nctgtgacactgccctcaacactggcacctcaccatcaatgaatcagaattgtgcaggagctgatcacataccctgcaatacccctccatcaccctgcctttaaaaatgctttcctaaaacccactggggagttcaggtgttttgaacactatagttgccctggactccgtgccagatagcctggaataaacaatgcacgttccttccccacaatgcagtgtcatatctagaattagttttacaacattatattttcaactattgccaagtattcaatcagttaagtggcagatactatgttaattagcaatgctaactgatgaacggtcttaatttttactctggactggtgaggttagctcaaactactgcattctttgtcatagactaagaaaaacagagtcaactaatgagtgaaataataataacagtgaaagaaaatacgatgacaggaaatcatgctgagtcagcgctctgctccaagtcatctgttctcacatatgcccttgacctcttggggtgagcctctcaatccccgcccttgccgaccccccttcttctcccatctgcattcagtaaatatttactgagtgcccattgtgtgtctgcacctaaaggcaaggagtaaaaaaacttgaaaacaacaggagctggtattgattttacagatttattcttctgcagaacaaggccagcctcacccaggggcgggctgagcgagccctcctgctccagctcctgtggaaatgagccctcacccaggggcatcttgttctctggccctgccaggtgcctgccgttctcacattagtcaccacttttcattaaggccccgagagtctccctgatgcaaggcaaaggttacttgggaggggaaacaaattaaaccattaacacagatgagttaaacacattagcttctccctataggta

SEQ ID NO: 64713 - DNA, 958 bp, Bovine  19866880764900
  misc_feature (1)..(1): n is a, c, g, or t
nctttttaatggctgagtatactccttgtgtaaactatgtttttttaattagctataagaatgccgtcaaaagccagggccattgccacaatggcgcgcgtgaaaggtactaggcaggagcattctttccagtggggacggtgcactcccagggaaaggcaggttctgacaggtggctgctctgctgtgtggtgacaggcgtgcaatgtgcacaagctacatgtgcactttggatgcaccagaaattgtacccgagacacaaacctgggcagcgaggaactaattcccaacaatttcccccctaatgtttaaaaccaagacttgcctgtcctgccaagtagtgtgtagctgactttccctctgcctaaaccatctcaaacaagatctcccaacacaactccagaaataatgcatacacttgggggtttgaaaaaaacccagggctcttcaagctaattaccttggttaattaatatatcactccatttgtttcaaaactcattatgttcacaaaaggcctactggaccaacagaagaggaatgaaaataaatgaccagggaaacattaatcaaggggaaaaaaacatcatttgctgatggaaaaactaatatgaggattaccaaaatccctaatgactttccctcacaggggctacatttaaaatcatttctgagggcaaaaatgaaagctacgtctctgctaagatcttagcactggaactgaatacaggacttctgaacatggcaaatatcctaataactgtcactgttgttcaataatctttcactgggaggtgacagtctaagatagttgttttcagcagactttgggtatgctgttctgccatctgggagatggcctctgttttctcatttgtgaaatagtgaaattgcattattcatggtagataatactgtgttttgaccaatgccaggcattggaaacaacctcaggatt

SEQ ID NO: 64714 - DNA, 1368 bp, Bovine  19866880833028
  misc_feature (1)..(1): n is a, c, g, or t
nccactcccagtattcttgcctggagaattcccatggacagaggagcctggcaggctacagtcactggggttgcaaagagtcaggcatgactgagcagctatcactgggtttcccagatggcgcagcggtaaagaatccgcctgccaatgcaagaaacatgggttgggaagatcccctggaagaagaaatggcaacccgctccagtattcttccctgggaaatcccatggatggagaagcctggtgggctaaagtccatggggtcacagaagagttggatgtgactgaggaactaaaaacaccaacagcttgtggtaacaggtaattaaagcccactggccaggtctggttcatttaaaatcccccagttctcgtcgagcttcatcattttatgcatttatatatttaagaggtagaaaccatttctcatggagacaagatgtgtccttctggttctttagctgattggtgacagagtcagatttgctagggacttgggaagaaaaagagaggaaggatcttagaaatagtagtaggttttgagtaaagactcagtgtcttcaaagagggctatccatggcctttgaatgagcagggaggaaaataatagatgaagtgaatgaagggaaattggcaaagagagctcagttgaaatgtgagagaaggaataggttgaaaattataagttcctgcatttgaaaagtaaaacaaaaaataaaagaaattcatttagaattatctctcaatctgtgttaataatccaacaaaatgagcataaagtcatagtaggacttaataaaggaattttaactttactgtatgcattaaattcctaataaagagtttaatggttagctacaacaacaagaagaaactggatggataaaataggatgaaacacttggaaacaatggtgctaatgcaaaatgaatcatttgaatagtctagtggtatttttaattcgtgtaggaattgtatgccgtggttctctgactaatgccagcaacccttgctgttacagtgggaatacagacaataaactatggaaatgctttttcagttcatggctattggaaatattattgtcagcattagtgtccgggttcttaaaaatgctggaaatgaaattaacctttatagctaaatgcttgttaatatttcaattgaaaggcacactgaagagtcaatagcattctcataaaggatcaaagtcattaccaataaatgagagcaataacataacaaataaacatattttagacaaggtgagggtcaagcttcctcttttatgttaatacagtaagttgatgaactgtatagtgaccatggtcaatagaaagtggaagttaacaagtgtaattatttcta

SEQ ID NO: 64715 - DNA, 797 bp, Bovine  19866880910134
  misc_feature (1)..(1): n is a, c, g, or t
ngtgcttgtcctaagtattcaaagaaaaaagtaaatcagaaaaacttcaaccatgtgacctctcccaattctcctgactaaagtttatctcagcgtttgggtctgccaactatttgatctaaacctcttctttgaccccttcataggggaagcctagcagttaactcagaaacagtatagtttctggaagttgacctgagccaactgaaaaatgtcctgagatggtatcagcatctttatccatttttcagaaaaagcttgttgattcaatattaactcctatagctcttacaactccctttgggataaatatttaatcaacagagcagttgcctttttatttcattatggagaagtttcaataaaataaaatagtgtattctaatgaatgacaaacactggtgaattttcatttaaaatcaataagttgaaccaaggaattgttttgtaacttatgggtcatctcaatttaatgaacagtaactaaaaaaatattatataaatgcctggcatgcagaagggatgcagagcaaaaggctagttattgtccccctaggctttataatccttaaagaaagggatgcattttgttattttttccttggccaatgcctggaataatagcaagcaggtcgtgggtattcagtgaatacttgccaggttgaatgaattaataagtcgatgtaagaagagtgttttcctttagagaaaagcacgcagtactttcctcatcatggtcatctctcagtgggatgaccctgaccacaggggattataaatcatatatattctttttc

SEQ ID NO: 64716 - DNA, 792 bp, Bovine  19866880927222
  misc_feature (1)..(1): n is a, c, g, or t
ntcaatcgcagcagaaaggtagcaaagcagatgagataatatacagggtttattcctaagtcattcactctcccctcaggctttaaattgtgattgtgacatagataacgcttgagaaagatttatgaggaccctaccctagtccccatctgtctgcaccaggagcccctaatacaaacatttccaaagcaagtgagggaagttctgtcttgggagtcattaaaaagggactgggcaaaacactagagaatatacagcagggaacgatacagagcggctccatggagaatcagctcactgtgacctaatatttaacatcgatagttgacaatgttgaaacattaatggtaaataaaatgcagtgaaagatctctgttaagcaaggatcttgtgttaatgatggttgccaaacaggcatctgatgggggaggagtagcgaaggggaggaagaacacttacttcatctgaagaccaggaaatggactagtttatcttactgcaacaggaaagaaggtgaaatagtaaggtttatacagttcaggtttccagagcccaagtgcattctatgtgccagatactagagcgctgattcttcaaaacgagcctctaatgaataaccattaatcccaccatagagaagacagatgtaccttcacaactcttcccctgaggtaaagatgaggaaatagatcaaaagtacgcttggggaatctgaaatcacttagccaactgagagactcaagaatgagaaagatcaggttgggtcattgctagtggcaatcagtaactagt

SEQ ID NO: 64717 - DNA, 2019 bp, Bovine  19866881085525
  misc_feature (1)..(1): n is a, c, g, or t
ntgcccacagctaaatccatcactggaagaggaaaataaagtaaccgctattagcttaggttgatcacagtgcatcctttatagctccgagggcgtctcagtttgttcagtgcatcgtcaagcaagacttgggggaaaagggaaaagggctgacagtggttgctaggcaactgacagtgcctcccccatgggtcccagccctggccccagcccctttgcccagtcccatgtggtcactctgctgagatgctcctggggccatgactgctcatggaaggccagctgtcctcacagaagcccccagcactgccaccacgtggggctctgcgagatgttcactgccctgccctcagctcccccatcctgatcactgaaatgccctccgctgttgcacaatggataagaccctggtgttagccttcgtggtccagaaataaaattccccccgtcataggggagctgcgagttgagatgagggcgattcatcaccagatgagaggtgagtgggaaatacgatcaatacctcatttggattcacttctacttatatctgttttctacagatttggattttcactgaaattattttagcagacgcagcgacccaatctacaccaaactgacttggactctttccaaagttctctgtgtccagaagagtttaagattgcatctctctttcccctgtaagcctcgtcatcattctcctctgcattcccacgcacagccacagtacagcctccaaaagagcctaatacagagtgttcttatgtcttggctttggtcctggactgggggcaaccaggtctaggctagaggctcgtgcagagtaacccttcccccacccctggccactgttggcctcctgctgccctgtgagggcatctgggctggaggccgtgggaagaagaccacactgtcaaagggaagatacccattgaatggcaaaagcgacctgtatttctaaggttgctgtgacctggccacagtggagcagtgagaggaaaaaagacttgtttacaaggtgatggattataggcaagagactaagaccctgtcaacatctgcagcatacccattcattaacgtctttcataatagtataggaccttgacatgtcctaaaaaaaaaaagccttaaaaatagactcctgtgcttaggaatcgcttcctggcatgcctataataattaatgtctctggacagatttatcattctctgaacatattctgagcaccttctgtgttcaaggcactgcagcatgcactgggatatagaaagtcctccaggagttcacaattcactgagatgcctcctccatttgtattcttaaattcatgcctgctacgtgctatcattatgtactgtttgtatatccccaagaacattatatcaagggataacctcagcaatttgttttagaaaaataacaggaataatgactttttaaaaagtgttttgccaagcctcgccctccccaaaaggctccctgggtgaactggacttagtcctggagcatctgtggtccatatgtgtatattcaagctaagatgcaatgaaatgactttccccaggcttccacatgcccgagggtccccacagcacagagaatctagcagggcacccctaaccgcccccctgcccaaggttatatagatcacattgtgctcctgaagacccatcatccttattgccagacactgggctttctaatcacttcatattcagtcagagagccagatgtccaaacccagctagacaaatgcaggacagctcagcagaagcacttctaatgggtgtcatcgctaaggtcttaaagaaccttcccttggctccatcctggacaagcatgtcctatagaagagtcacctgtgttgacagacagccctgggattgtaccctggttctgttacttgactggctggggtttgcttggataaattgatgtttaagcttcattttgatcttatgatttctttataaaggggaaccatcatcattatatctatagctgaaccta

SEQ ID NO: 64718 - DNA, 1282 bp, Bovine  19866881121918
  misc_feature (1)..(1): n is a, c, g, or t
ntgcaatgcaggagacctgtgttcaattcctgggcttggaagatcccctggagaagggaaagtctacccactccggtattctggcctggagaattccatggactatatagcctatggagtcgcaaagagttggacacaactgagaaactttcactttcactttcataaggctaagaagtagctgttattaccacttccttttatagacgataaaaataaggcacagagcagctaaggtatttgcctaagtttattcagctggtggggcttccctggtggctcagcagtaaagaatccacacgcaatgcaggagatgcaggagactcaggtttgatctctgggtagggaagattgcttggaagaaggcatggcaacccactctattattcttgcctggagaatccccatggacagagcctgatggtctacagcccatagcgtggcaaagagtcagctaagactgaagtggcttagcatgcatgcatcccgctgggaagtgataaagccaaggtgtgaagacagacctggtttgttcccgtactctgtgctcttaaccacgtcaagctggcattgattctctgggccacatatttgagatccaatccattgcaactattagaattacttccggagctgttatgattgaaacaagatctgaaagagaagtaatcctggcagtgcagaaatgatcattaagagaaacagagggtagccaaagaaaacattttttttctccttcaagctttttctaaaggctgcactagaatgagacaaaagcctagaataccaatacgctgataaattgcttaccaatgctgaacaaatttgtcaacaattctatctccatatgttatatatgaaagaaagtaaaatcatctaaaattatccacgtgttctaaatggaggattagaaagggaacacctatccaggcccccacccacaccccacttgtgaaggcaccttaaggccccttgaggattggccactgtttacttgttaagcctcacatgttccctttttccgttcaaattctgcattccagttatgtggaaatggattcatttatctgaaaatgctccagacgtttcaccccgcaggtcatggtactggctgcttctgctccaggttcccctgttgccagcctaattcttcttcctgattcaggtgaccaagtgggcatctctgcacaggaactcctcccttaccctttgcccaggtttggggctttgcctcttgttcatattacatgctttgtagttcccaccaatgccctgcagcttg

SEQ ID NO: 64719 - DNA, 903 bp, Bovine  19866881165400
  misc_feature (1)..(1): n is a, c, g, or t
ncttaaagcacactttctctccagaggttctggaggatagacattggaaatcaagttgtcagcagggatacacttcctctgaaggctccagggtacttccctgactctccttccttctgatggcccccagtgttctttgacttgaagcatcacctggtctctgcctccatgaccttctctgccttctcctcttcctgtcagctaccggtctttgagtttagggccatcgtacatctagggtggttttgtctcaatatccttatctaattccatctgcaaagattttatttccaaattttactctcatcacttaagatatattcttatggatttagacttgctctgtccagagttctcttgttagcaatcaaaaaggaggaaaggtttttttgtgaatgcgttttgggattgtttgctctggagctgcagcaacctaggagtctcaaaggaagacaggaagtaatgatgagacacagagagggtagatgagagggaaggggttgaacacaaatttcagcgtatttgtagtttggataaaggtttggccaagagtacattctcctgagaagccttcacagaaggggactgaagaggctgtcaaccacccagtgaaaacctccatctatgggtttgctaacatgacctctaaattgcattggggcctgcatcattttttgaaactgtgttcagaagtacagattgtaagtctcacttgcaacaacaaaagcaatttctaattgcagagaaagcaaactgccactagcaaagcaaatccactgctcctcattttatggaacgtgcaaattgtctctgttacacttaaacccccaaaatgtcaatttgcagaatccatctggcccgctccatgaatattttttgtagcattttaggaaaagctttgct

SEQ ID NO: 64720 - DNA, 1404 bp, Bovine  19866881247619
  misc_feature (1)..(1): n is a, c, g, or t
ntcttctacacgctagagcccacccacacccatggcttcaccaatcacttacaatcattcctgagtctccattccagacacacatgaatgagtaagcaaatgtgcccctgactctcagaggaaatagcacatcagatcatgctgtttgtgttttgttttgcattaattggatgcccagcattgagttagtaacacagacatgatgggcaatgaaataaatgcatttcattccttgttatttcgaaccccaatgccttaaagggaccatatacttcacaactgcacgattactgaagagttgttagagcccattctccttgtctaaaatactattttatctttagcaagttgggattaattttatagtgccacttaggaattgtaagagggcaaagattttctgcagccattcttagtggcactcatattgtcttcatgaagacaatcaggaggatggggagaagaatgcatgttaaaatctgtgctgctgtactgcttgactccggctacatctttcttcaacccctgcagtctccctgagtcactaagctggtatagattttgtttctggagttagttaccaagtcccaggttactgggatcctgaaattcctataaaccctatacaacataatacaacttgagtcctagactctgaataccacctggaatagaattgcatggaactagaagagcttagttgagcccacaacttagttttcttctatgatctataaagacagaccccaacccatcgaccctattctctaccacatgtctccagcctccccaggatctaagccccaggggaaaaaatgaacttgaggttaactgagcagctggacactcagtagctagaaagacgtgtgtttatgcatcttgtcaatgattttttccccccactcccaaggtgttagttcctgaacgcaatcactttacaaccaattgttgtctgcataatggaaattcaaaccatgtttcctaattaatctattgtgttctctctaatttgcatgaaacattgtaggagcaatgccttgtaagtgcctttctctggggccaggggttgttagaaacctgcttcagaaaagtgtctctgcaggggagaagctagacaactttcagcactgtcaccttgtcgcctgggctgcctctcctctggctgtttagaggtgaacagatcctgcgtctcaaagtctctctctaggtctgtgtcctcagtactgaacaggtaagcacagagctgtagcaaattgatagggactggctataccagaatgctctaacatctgctcctaggacctgtggctggatttgaagagagaatttggtcctgcctcataataaaccattcatgtggctcaaaaccctttcttccagaaagcaggatgtgaagtgggagtg

SEQ ID NO: 64721 - DNA, 2205 bp, Bovine  19866881360421
  misc_feature (1)..(1): n is a, c, g, or t
nttgcacggatggtcacactatttgtaaaagcctggccattcctgagaatggatgaatgatggtgattagttgtgttaactccatttatccaatcactcccgatttctgtgcatccacatttggtggccagctgtcctaccaggagctggcaagtcattgaccttgatcaacgggttaatttctttcttgaatttgtgccaagatctcacatatatctctgtacaccctcatttaaagcattggatggttatctcgttaaaaatattattaagggcactggtagaaggttccaatttactttgagtaagctttcatagattcctcagataggggtgagggggaggacatttgaacttcacaatgattttagtcctcagtctttctatttcctctaaccatctaacaatctatggttgaaatttctgttttgggtacatgttgatctcacaacctaagagtattagaacctaaaaggaaaatggaatttcataatttttttcaaaatttgtgggagaaaagctgagtcttctcttgtgatccctggtgtggccacgctggggagtagaaacagagtctaaccacattttctttgtctgcttagccccctatgttaaaaaggagcattgacttgcctaggttgctttttagatgcttctctgggacttcatttgctggtttatggtccagtaggagactaagagctcatcataaagtctgcattcagaccaggttccgctcagactaattaatggaattatataatcgatcgcttctgtttctatttctaggcctcctacattttgagatgagaacatagaagtggcaatcgggttcacaagggcacccttcagagtccctcatttctcctttctcttcgatggcacagctcataaagaatacagcacattttctttccttgaaaggttcttggcactttttttttttttttttaagatacaaaaaactcccttgaccattcaagtggtgtcttctttgactcagaataatgtatcaccaggaatatttggcaggcaaagatgcaattcaagggaagttctagagtaaaggatgtggtagcccttgaagaaagccatggagcaaaagaaggaagattagtttctaccagtggaataaacaaattatttaaattatttagtgttcagccagtaggtaccaatatgggtgttcagatttctaaaaactaaaatattttttcactggtaaatatttaccatccaggaccttccaaaatgtcctgccccctctgttctgattggccagtcaattcccagaaagtcttgcttctaagatactaggattagctttttccccaatcactttggaaagccaaatgaaccctcacaagcccctgggtcacctttgtgccctccagcctgccagccagactgctcagcatggctccctgtatgctgaccttgcagtaacactgggctcctcgaaattgtgacacccacataggttggtattccctgaatggctgtcgcgtggatgtcagtgggagcttcagctctgacagcagatgaggccagttggagggctgagtctcagctgtgtttttggttaactttttgatactatgcatcctttgatttaattacctttgttctgtggacacagtcttgactgatcttgtgaccttaaagctacataacacacagtgatgtctataatggctttttaaaacaattatttttatctcttttgccaatgaaatggtgttcagtgaataaagctttaaaaaagatgaatgggaaaaaatataaatcactcattattgcatgactcagagacttactgtaggcattttggtattttatatatatatatgaaaagtaaatgaataatctcatatatacttgtatagctttttgtgaacacagtttcaagatttgtaagagttgagtgggaactttaaagtcaactagtttatcctggccaaggaggggaaaaaaaatccctttacatgacatccctctcaaatattctccagctttctccttggtatctcaaatgacatgggcccatggcttattattcctctcccttcacctttagatcattaactattctggaaagttctattttactcgatctaaattcttctttcctatcctttacccatagatttttggtttttcccttcttagcaaacacaaggggggttgaaggggcacagaattata

SEQ ID NO: 64722 - DNA, 680 bp, Bovine  19866881407034
  misc_feature (1)..(1): n is a, c, g, or t
nggatgtcacccaagaaagatctctctcctgagtgacagcagagacctccgtggcacccacgtgcagaggttggtaggggcccagtgttcacagtctatcttctcctccacaaacaaggcgaggtgttttatgctagcagcaaagtaatgatgctaagagactgaatgattaaatgccagtctgcgagccagagtacatttgttttctgcttgaaaaagccactttcattttgtatgacagctttcttaactgcaacatagctcagaaaatgacagagagcgaatgagaataagtgattgtaaaatggcaaacaactatttgctactatttgaactaccatttaactgttcattcaatttctagtcagaagccatcactcagctgtggaaccagaatgtaggcattatttatttggtggcattacaaagccatctaatcttggggaaaatcttagaggcaaaaatcagaatatccaaaaattgccttgacatttagtggcaaaatacaatgcttcactgtggctttttacttctccatattcttttttctcattgttgcaactgaaatacttgaattccattcgcattctagtgttacatcttcaataatatgattttttttccccacaagctatctgttagcaccgggcagagctgaagttttgtaagatgtgcttgga

SEQ ID NO: 64723 - DNA, 744 bp, Bovine  19866881438581
  misc_feature (1)..(1): n is a, c, g, or t
ntttctgttaatcgttttcaaatgtcacagttttcactaacaagttataagacagcttcatgcactttaatttcctctgaaaagaaatccgctgccacctttatgaaagactaacattccaagtacagcttttgaatgctaatgccctaccttaactgggctaagctctgtaattcacatgtgttgtaatttctctcccattgtagtgtaagggcatttcacatagttttgatatattgtataaattaggccaacaaagtgctgtgctatgtcttcattaaaataggagacggtaataatgcaaccatgtagcgtggtcttgcagcctttgaattatgaacattcaatagcatctccttacttgtgcttaagttggcatttgtgagcagcatataatcaattaatcaataacccaattttctgttaaagagatggtgcatcatttaaaaaaaaaaaaacggggaccattgtatgagtttatgaaaaagagccttgtcagcaaggaaacttgtttgaaaaacactgaaagcctttatttgggaatgatgattttgcttaactaagccaaaagcaaaattggatacaaatgttcagttcctgaaccattttattattttgctgtggctagaaagaaaagcatccatttggaattgctaggaagaatgcattgttttcactcatgattagatatggggtaagtggattcatctatggaaatgcagagtgaaaataaactaatcctaa

SEQ ID NO: 64724 - DNA, 866 bp, Bovine  19866881534114
  misc_feature (1)..(1): n is a, c, g, or t
nctatctttctgcctacacagcacaagtcagtaacttacataattcttccgggatattctaaaagccccaaggcaggagttcatactgtatacatttggcattcagaatcggatgtggaagtgaattcattgacatccagggagaatttccaaatatttcaaaacaatttttgcagttcctcctatttgcattctttagtgtgtggtgtcctgctaatgtttgcctttgtcatatatttgtcatacatgtaccatttggcattctgattcagcaaaactaccatatttagttgctttgccttttagaggggtttattttacctgatggagaaggcaatggcaccccactccagtactcttccctagaaaatcccatggacggaggaacctggaaggctgcagtctatgaggtcgctaagagtcagacacaactgaacgacttgactttcattttcactttcatgcattggagaaggaaatggcaacccactccagtgttcttgcctggagaatcccagggacgggggagcctggtgggctgccatctatggggttgcacagagtcggacacgactgaagtgacttagcagcagcagcagcattttacctgaagaggctgaaaagtgaaagtagtagttcctcaattgtgtccaattctttctgacccctcggacagtagccctccaggctcctctgtccatggaattctctgggcaaggatactggagtgggttgccatttccttctccaggggatcttcctgaaccaagaatcaaatccagatctcccacattgcaggcagattctttaccgtctagccaccagggaagctgaagaggctgtaagaccaaatcaaatcagggagg

SEQ ID NO: 64725 - DNA, 758 bp, Bovine  19866881720971
  misc_feature (1)..(1): n is a, c, g, or t
ntagagtagggtgggaatgggactgatggggttagaaccctgatggaaattaagattcaagctctaatagttgcaagtaatctgtctgtctgaggcttccctggtggctcagtggtagaaacaatctgctagccaatgctgcagatactggtttgatccctggatcaagaagatacctggagaaggaaaaggcaacccaccccagtattcttgcatggaaaatcctatggccagaggagcctggtaagttacagtccatggggtcacaaaagagtcagacatgacttagcgactaaacaaaaatctgtctgctagacagaaagacactggggaaatttagaattattacctttaattaatatatgtcctttgttctacaaacctttccttaattctaaccccctcttttacccacactctcttctataatccccttaccacatagcttagacagcccaagaatctctcctaatggcttaaatggaacaactcttcctttcttgggtggcaggtagaaagaagagggtgataagaactccttctattttcaggaaaatgaaacctcattccatctctacctccacccccacaggggaaaaaaaagtaaaaaaaacacttggctcacaccttcctgtttcaccaacccaatttttttcctgtttcaagcacaaaagtaattacgggcctagctataaatatcgagtcttttaccttgacagaaagcgggaatgatacaagggtttaatggtattatttat

SEQ ID NO: 64726 - DNA, 719 bp, Bovine  19866881871795
  misc_feature (1)..(1): n is a, c, g, or t
ntgaacttgaataaaatgtgctattttaaaaaagaaaaggaactctgcccaaaacatttcctctgctgaatctataaactatacaaccccataattgctttcttctctacttccactggaagtgttcttaggaataataagttgatatttgctaagtgctttgagctccttttgaaagaggtgataaaaacttctctaaattatttttatcacctccataaaatttaaaagcaaagtatcattccttctcaaaagcgggtcttaccctgattttcctaaattataacctctgattagctattgaaactccttgattacaggctgacattgtgttatcttgggaatcatcccagttaaatctgtgaaaaaaattgattgtagcatgacaagaccatgaactattgtagtttggaacaaagcttcaaaatagtgcaataaatttgctgcttaagttctcctggtttcaaatatgaggtcaatgcgatggctttatgtattgattaatcctgtcagtttgatttatttacttcctaataaccaagaaggatttgtaaggatttttcactcttcatggaaaaccctcacagtgggaggaaacttgaggagtcttcacagtttctgtgctcatcctcagtggggaccgcaacctggtgaattccacgtaccagcaccatcactcgcccatgaaaattctgccacgtcttcatgggatgatcaaa

SEQ ID NO: 64727 - DNA, 1219 bp, Bovine  19866881933842
  misc_feature (1)..(1): n is a, c, g, or t
naaaattggggattatttatctacatatttatgattgattatttgcaaaaagatggaagaatcttttcccgagattctgcatagtctttgcaaattaggtacatggtgagtcccctgggagctgtaactctgcactacacttaatatccaaacagctggaaggaaacttaaaggtcaactactctgattactcatataatatataatgactatacagcatccctgacacacagccataactctgcttaaaaacattcacgaacaagaaacttactacctggaaaagccattcagcatcttttcatgtccgattggccatctgcatgtcttcctcagtgggatctaaaatattgcacgaacggacctatctacaaaacagactcggacttagatgcagacattggggttggcaggtgggaggggcgtgggagggatggcctgggagtttggggttggcagatgcaaactactacactgagaatggataaacgagtgctaatgcatggcacagagaactatgttcagtattctgtgataaaccgcaacggaaaagaatatttaaaaagaacgtatctatgtgtataactgagtcattcttctgcagagcagagattgccataacactgtaaatcaactatacttcaaaacaatttttttttcccttaaaaagccattcagtccatgtttgggcattctaaaggttagaacagtctttgcagactttcttggcttaatacccataataccaaaaggtggtacttctaaggaaaagatagctaaatgtgactacatttaaaaataataataaacaaaaatatccctgaatgtatatggataggttagactatactacagtaaaaaaaaaaaaaaaaaaaaaaccaaatcttagcaattcagtacaacaaaggtttattttgtttacacactttgtaagtaggaggcaccacccattttttgtcacttggggacgcaggtagacactgtccccatcacatgctgtcacaatcagcacagaagaggaagttacacactcgccgacagggaacacagtccctggctcgcagtcagacactgctgagggttttagcatgagcccacgggcgtaaccaccactactctctttaaagcaagtgtgtgtgcactcagtcgctcagtcacgtctgactctttgcaaccctgtggacggtagcccatcaggctcctctatccgggggatttt

SEQ ID NO: 64728 - DNA, 676 bp, Bovine  19866882172569
  misc_feature (1)..(1): n is a, c, g, or t
ncttactgtaggagatgaactctgacctctcgccgtatcactgaaattccgaactcatggagcatgagggagaactgaccactagagaagagtggattatgtcaacctcacgtgttatatatatatatatatatatatttttttttttttcaggaaggtgttacctgattggaataataaaacttttaatatacttcgaagttagtacttttcggagatcaaagcacttcctaatggtattataaaatcagtagtatgacattaaccccaaagcatttaagattttcctttcaaacaagacttcaagtaaagcaaatgttaaacttgacaattaaaaaaaaaaaaagatgagcaatccagattattttccccataggccaattgaaaaaaatatgcaaaataaaatgacatgttacatatatcaagtgggtaatagtaaaaaataaaatgcaaattattatacacttttataattacagcacgaagacaaattacagtaacctttagtattctatacttttcttcctccttcagtagatggttgattccttctatttctgtgctttagagctgtgctaacacatggaaattcagtttggctgactgatgatcaaaattactatagtgctttaaagttctttgacaaattttagcctggggttacaaaaccaggtct

SEQ ID NO: 64729 - DNA, 3119 bp, Bovine  19866880167841
  misc_feature (1)..(1): n is a, c, g, or t
ntctccctctcccacagaggccaaaatactgttctatacatctgtgtctcttttgctgtctcacatacagggttatcactaccatctttctaaattccatatatatgcattagtatactgtattggtgtttttctttctggcttacttcactctgtataataggctccagtttcatccacttcattagaactgattcaaatgtatactttttagtggctgagtaatattccattgtgtatatgtaccacagctttcttatccattcatctgctgatggacatctaggttgcttccatgtcctggctattataaacagtgctgtgatgaacactggggtacacgtgtctttcagttctggtttccttggtgtatatggccagtagtgggattgctgggtcataaggcagttctatttccagttttttaaggatttctttatatttgtgtatgtaggagtcagatcatgtctcagagttcccaggaagatctgatcagactattttacccttaactccagtattgggaatggtactggaattaatatttgttgactttaaaaaatcgttctgctttatttctttatccacattatgaggaatttgacacatacagagcaatagttaaaaaaaaaaagattctcataattctgttacccaaagaaagcctttgttaatgtttgtgtctcttcttctagtctttgtattatagttttccacatgtatgtagaacatagtgttaagaccataatatcattggaatcaagtggatctcaactcaagtacctgttcccctaccagctgtgtgaacctggataagtaagttagctttgctaagctttttttctcttacatgaaataaagataaaaattccaatattctatggttattgtaagaattaggtgagcttatgtgtgaaagttacattataatcctcctttagctactgttaatatagtagctaatgttaatgctattagaggtgtgataataccatgtcttgctttttccacttaacattataacatattttttagattattacaaacccaataaactcatatttaacatattttactaaatttttatattttacacagtttcctttaaatttctactatttcaagaattctttattctagaaaatattgtcaaaagtagataatagcagtagagataataggaaaattatttaaaagagaaaagaaaaataaagagttcagtcaactaccccacatggtctagaacacgccaaagcttttcgagttcaccaaattgttttcacaccttgtgtttctgttcatggaaaattatcgtaaattgacagaaagtcaagttggttgggaagacctcatcatgactgatgagaattcttgctagcaatcaatgaaaaagcagatgcttatttttcagaacattttagttggaagcagtcaaaacaaaggcatcaatcactagaaaataatgaagtggaaaaccacattacaaaaggatcagaaaatagattattagtagttggagtgattagaaattctgtggatacaaaatctagctgaacttttaacgggagaatttggacaccttgggaggaacaggggagctttcttactatggacaaaagaggcagaggaagtggataatacaagaaaaagaagtgagccaatgtgtgtgttgcacccaagagtttgatctattaaagtggaaagcacttcttatgaagcagagggaggggaatatatggagtttgtctaagacatgaatgctctcaagggaaattggttaaaataccattgtagatttttaagcgggcaagtggaagctaagagaagatattggcaacaatgatgatatataattatattcttcttacagtgggggtttctatgtggaatcaaagtcacatgtagcttgcagtggacacttttttattataaataccatggccacttgaccatctataaatgtggggattgaagctcctgctcaatcactgtcctcagggatccatatgcttccgccatagatgcatcctccaagtccccgctccatgccgctcacttctgagttccaggtcagatggcccttttcatttgcagaatctaaaaaacaaggatttggatttggagaatctaggacatagtagtcatgtatggatgtgagacttgggccgttaagaaggccgagagccaaagaattaatgcttttgaactgtggtgttgaagactcttgagagtcccttagacagcaaggagatcaaaccagtcaatcctaaagggaatcaaccctggatattcattggaaggactgatgctgaagctgaagctctaatacactggccacctgatgcaaagaactgactcactggaaaaaacaccctgatgctgggaaagattgaaggtaggaggagaaggggataactgaagacaagttggttggatggcatcaccgactcaatggacatgagtttggggaagctctgggagatggtgaaggatagggaagcctgttgtgctgcagtccatggggttgcaaagagtcagacacgactgagtgactgaacaacaacaatagaaagatgcaaggaagaatctaagtccccagttatgaagaagtctgtgattacatgttttatggctaattttgtaaaaaattacaagtgtagaaagatggtatagaagtattttatacataacatattcaaaagcagagacattactttgccaacaaaggttcgtctagtcaaggctgtggtttttcctgtggtcatgtatggatgtgagagttggactgtgaagaaggctgagcgccgaagaattgatgcttttgaactgtgatgttggagaagactcttgagagtcccttggactgcaaggagatccaaccagtccattgtgaaggagatcagccctgggatttctttggaaggaatgatgctaaagctgaaactccagtactttggccacctcatgtgaagagttgactcattggaaaagactctgatgctgggagggattgggggcaataggagaaggggatgccagaggatgagatggctggatggcatcactgactcgatggacatgagtctgcgtaactccgggagttggtgaggacagggagg

SEQ ID NO: 64730 - DNA, 1201 bp, Bovine  19866880353588
  misc_feature (1)..(1): n is a, c, g, or t
ncactcggagctcactacaatctatgacaagaaaatccattcagaggcgtaactcattggagccctgagccaggatcaaattttttacctccagtactgacccacacgaacaccatcgtaggccatctgtatagtttatgccctgagtgtcaaatgaactgtgtcatttcagggccagctggcatgcccggatttccgggtctccaaggtcccaaaggccgagagggaaatgctgggtttccagggatcccaggcccacctggtcactcctgtgaaagaggtgctccagggataccagggcaaccagggctccctggggctccaggcagtccaggtaagcattggcaggtatcaagaactgcgacaggtatgggatgtatctacttacaaaggaataacctcacttgttcttttgtgggtgctgacaggagcaagactcttgggtcaagacattgttattcacagcacagcaagtagcatgagcttcttgttggtgacattcccccatgtcacccaagtctctctggtgtgatgtaagagcctgggctaccatggctgtatagtaatacattattgatcgggagatgtattaatacatttttagagagtgattacaattaacatcaccatgtgaagttgctagagcttaaaattgatcaagagttcattatacaacttattgtcattatcattcacattatcttgtgttaggtttttgttctagggacgggggagcccagtgggctgctgtctatggggttgcacagagtcggacacgactgaagcgacgcagcagcagcagcagcagtgtatattataaacccaagtttattaccataaaattttaaaaattaatgcattgcaaaaattttgactgaagaagaattttttggtggattttatacagatactttctctgattgtccatgttaaatatatagtattttctcaggagatgatagttgttcagaatatagttctgattcagacaatatgaatattaggccaacaaaaagacaaaaaaccgtagtgattgactctgacgtggcaagtgaaactaaaactcatggtaccaatacatggtacagggtattacaggtgtgtcagatgtaactggggcttctccagtggttcagcgggtaaagaatccacctgcaacgtaggagacacaggagacacgcgggtttgattcctgggtctc

SEQ ID NO: 64731 - DNA, 1931 bp, Bovine  19866880502339
  misc_feature (1)..(1): n is a, c, g, or t
ntgggccatgatgccctgcgggtgttgtgcatctcaggcaggtgtgattcccactggctggtgaggttcaggagatagcaggttagagggagggaaagggagaccctcagactcatcgggaaacacctccgacacctcaccatctggtgaggacgttacagatagtgacaaagttatttctgggcattaagaaaagataaactaagcccttgagacattagggaaattaaatgatgcaaattatggagcatggtcgggggggaaacaacatagaaatgggaggattgtcaagtttcaaaatgagtcaaattagcttcatggactggacctcactaacacgtgtactcgatgtcacaatgtcacattgacagctgcagctgaaatgtttgttctgtctctgtttcgtgctaaagataacgcccaagccatttccccccacccttggaatctgggatgcagagccctgtgagtgtcagaacaagggcagtgcttgacgaccttgtgctctctctcttcaggaaatcgcagaagcagccccccggcctatgggttccgtctctcaccagaagaagaaatgaggagacagcggctgcacagattcgatagccagcgaggcgacccagccttgtgaacaaacatggtccagttgtgcagtacttacccccagaccctccgttttgtacaaaagcagagcgggcacatcgccatcccagttgctcacacctgcagtggcctgtcatcctacggccaccatgagtccagttgatgtcttgagctggttgatgtcttgagaccaggcttgttttgacagcccccagctctctgggaatggtacttccgaccttgttctcttgcagacaggagcttgggcgtctccacttggggaccagtctccacgctcccttctctcactgttgactcagtggaggccctgccttgttatgtctttgaagaccttgacctttgccaggaggtttgtgttcaccagcccaaaagatcaggcccccctcctgctcagtgcccaacttggcaggaagtggggagccatccctcatcctcctggcatgttgccatggtgactttccaggcattggatgtagccatcattgcaggatgtcgtcctggcctcccttgcccaggcgcctcggttcctggggcccccacgtctgagtggtgtctgcagtgaacctgcttttctctgatgcccctctgccttcccggatgtgttagtggaaaagcttaagtgagaccttggacaggaaaccagttccacactccacgacccggcaggtggcaccaacaatccagctacaagagcctctccagggatgatgtcacatcctggagatgcaacttgtattgaactaaccagcagagcagcagcaggtgccacatgcagaagagtgaccagcagcttggtcacagagaaatccttcctgaggaagtatttttttttctcataaaagtgccttttaattgaccactgtaacagccaccctccaagacactccccagcacacagaccgcaagtcacttaagacgtctttcctggtgcttgagtttcatgaataaaaggaaaaggtcaaatatcactcatgtcttatgtcactgagatatttatttttaaaaagagttaaaagcagaaaaggatcttcctctatggctttatctagcacttatatagttttctgattatgaaagtaatatatataccttgtatatgcataaagccaacatctgacaggaaatgcacccacatattaacaggttatttgggaaagtggagtgcataggagtttgctttctgtttttcacaattttatattgttctctttttaaaatgtgtgtatatgtatatatgtgtactacttttgcagcagggaaacgatttatataataataaagaagaaatataaatcaggaaaaggact

SEQ ID NO: 64732 - DNA, 800 bp, Bovine  19866880603738
  misc_feature (1)..(1): n is a, c, g, or t
ntcattagattgattaaatatgcaaaaatgccaccatagcctctgggtaatgcagaaaatgtgaatacaaatggtgacctcccactgctagaagaataacaagaggaaaaccattgcattcccccaaaggagctgtgagctcgtgtttcctgataagccacaacttcttctcgtctgcgaggtagtgtgtgtatcctcaagcttgattgtgaggaactgagctttttggtctctctgctgtctggttgaagagacctgggttaggctgcctcgtaataatccttgtcattgtttatgcttcctaaatgctttcatgtatgtcacataatcctcaaaacaagctgagagtggtgaagatcattacaactccagccttcttgggccacagaaggaaaacagagaaacttggcgagccaagttcacacagatccagggctgtcgtgtgcagctgggcaggttgtgcacagtgtacaagacttctggttaagagagtgaatggggcctgagacacaaaccctgttctcctcaccacactgtgcagcttggtacaagcttttctacctggaagtaggggcatcctttccaagtttgcagaggaaagagttaaaggccaggggtgtccctgagctggccttgtgtctcttggcctccctctctgattcagtcttgtccaagacagttctcatcctttctatctcttatcctattcagggttctccctgcatctctgactcaacagcctgaaaatactacagtgtttggttatctaggtcctttcattgttcctcagtttttttgca

SEQ ID NO: 64733 - DNA, 829 bp, Bovine  19866880635262
  misc_feature (1)..(1): n is a, c, g, or t
nccatacaaatgagaggtgcttagtgttgaaactacctactctaacatttttaatttaaaaaagaagagcgtgaaaaaataaagatttactacaggcctactaggaaatgtgactagtcaaccatgctctccttttgacctgactatgaggcaggaagtatttgcctcatcaaagatgaggaaattgaggctcagagaggttgaccagcttgcctggattacaagatagccctggagtccagcctgaaactgatttgatgacaccaaagtgcaggcctggtctgtaaatccatgacctcctccttttgcataataaaggaggagcatgtcatgggatgccgagcaatattctacttcaagaaagacttttgagaaatactttcagtatatcctctattctttgggacctcctactttaactgaaaagcaaacaaaatccatttccattagtgtagatgttgtttcatctgacagactctgagtcacaaccctgcagacatcaataaaagagaaaatctctctggcctctttgccaacaggccaatttctttccttaatttataataaaactatgactgcaaaataatgaaagtgaaacttcactatttactgattttgatggctccattctttaaatactcagaaaggacactttactacatttgcacccgcagggaaatgactgtggttggaggttaaagttattcaacaaacaaaaagacaattttgtaaatgtatcttttcctcaaaaatgtaaagcagccaggataatttgtgggttaggcattttctgagagttaatgatcaattatgtgaaaagcccttgaga

SEQ ID NO: 64734 - DNA, 1745 bp, Bovine  19866880786099
  misc_feature (1)..(1): n is a, c, g, or t
ngcccagtgcccttgcttcagggaattgtgtatagcagaatttctttgcaattgtggttccaagaacttaaacccattaagaaaccatgctggtgcccctgaggaaaataaaagaaattaagagagggaaggacttctctgagtatagaaaggtttcctgagatgaaataagagtaagagagagaaataagagcaaagtctggagtggggatcagaaaacacatacaccatataacctctctacctgtcctatttcttgggtagaggctcatgggctgtgtccaagcccactggaccctggaaagccccactgaaatccccatgtccccacgtggcctcaagcttagagaccttcagtcactagactctaaggggcccataaaaataaaaataataattttttaaaaaacagtaagactgtcacatcaatcagaaatcaagagccgatgcagcccatggaaatcccagaggattccccaatgaacacatgactaatgaacaatcatccctcatccccaaaagttgctattgcatcaggagagagtgagacatgctctgcgttgtctgagatgaagtttccaccatgtcacatatggcgctagaaacaggaattaaattgagttactagaaaaataaagtcatattttgcacataccaaggcatgtagtctgagatccatactagctacctactcacatgtttgcattcccaatgaaatgctgagctcctagaagatactgaacagacgccttcattcttacagcagtgcctcccagatgttaatgttcacttgtatcatctggatcttgttaaaacacagattctgattcagtaaatctggggtggcccaagattcttcattcctaacaaattctcagatgccactggtcgtgagtagcaaagccacagagattcataatgacctacacatgtaatagatgctggagtgaaggcaagaacaaagaaacaagtgaatgacgattgaataacttgaattacagaatgtgctgattctatttgcctttcacatttttacttctgctctcagaataggaaggtatgacatgtgtacaacactacgctaaatgaattcatgcagacatgttaaaattatcactcttctagtccctggtgtttcagatgataaagaatctgcttataatgcagaagatccaggttcaatccttgggtcaggaatatctcctggagaagagaatggctacccactccagtattcttgcctggagaatccccagggacagaggagcctgaagggctacagtccatggtgtcacaaagagtcagacacgactgagctcacatgacaaggctgtatattgtcaccttgtttatttaacctatatgcagagtacatcatgtgaaatgctggcctggatgaatcataagttggaatcaagattgttgggagaaatgtcaacaacttcagatatgcagatgataccactccaatggcagaaagtgaggagaggatcttgatgaaggtaaaacaggagagtgaaaaagctggcttaaaactcaacattcaaaaaactaagatcatggaatccaatcctatcacttaatggcaaatagatggggaaacagtggaaatagtgacagactttattttcttgggctccaaaatcactgaggatggtgactgcggccataaaatttaaagactcttgctccttgagggaaaaactatgacaaacctagttcagtccagtttagtcactcagttg

SEQ ID NO: 64735 - DNA, 1507 bp, Bovine  19866880801639
  misc_feature (1)..(1): n is a, c, g, or t
nccctgggattctccaggcaagaacactggaagtgggttgccatttccttctccaatgcatgaaagtgaaaagtgaaagtgaagtcgcttagtcatgtccgaacctcagcgaccccatggactgcagcctaccaggctcctccaacccatgggattttccaggcaagagtactggagtggggtgaatatatacactaccatgagaaaaatggatggctagtgggaagctgctatacagcacctggagctcagcttagtgctctgtgatgacctagagggatgggatggtggtggagtggtgggaggaaggcttgaaagggaagagatacacgtatacaaatagctgatttactctgttacacagcagaaaataacacaatattgcaaagcaactataccccaactaaaaaaaaaaaaggcacatgaaaaggtgctcaacaggttcattattagagaaatgcaaatcaaaactacaatgacgatcacctcatacctgtcagaatggccatcaaccaaaaaaaaaaaaaaaaaatctgcaaacaataaaggctggagagggtgtggagaaagggtggtgtcggtgggaaagagcccggattttattctcactgtggttgggcagctccttgaagacatgatcccctggcttgtactcggcattctgtctgccattatgtttgcctcctggagagatgctgcccaggatgtaagactgcagattgctgtgaaaggtagagatgaagggaaggaaggaggatgggaggggagaaaggaaagagagctggagggaaggaaggaggagggtcagagtacagacatccatacagccaaccatccatacgtgcaatttaatgcttctctccattgtcaggggctccaggaaacaccaaggccagcgctagtgggtggggaaatcttccatcctcctgtgaacatttggtgtcaccctggtccctttccttgcatggtcctagatggtggtgggggctcaggagcctggagatcggtgaggagcaccgctcatcactgcccctgactcccattgctggcagttctgtctctcaggtcacagataacaactgtcagatggtctccctatgaagcaataagcttccccaaaacaaagaggccagccaagctccaggaaagctgcagtctggacaaaacacaccagcctggaaaaaattaagagttcatgagcaactgaacaaaggacctccgggaaatgcaatgggttaaacacgagcacacagtgttcctgacgcccttgaacgcacaaggagaaaaatcatcacacatccctggtaaagggaaaaagaaaccacaagagaaacaagtcagtgttgtcgcaggagaactaaaaataatgccgtgagaggttgggccagcccagaaatgaagggaaagagatgataggcagtaggggaagatgagaaatgagtcagggcgagggggccatagcctggcccttttgtcttttaaagagcgctcccttcacagcctcggt

SEQ ID NO: 64736 - DNA, 2052 bp, Bovine  19866880837218
  misc_feature (1)..(1): n is a, c, g, or t
ntccctctgttgtgaatcatgatactatatgatccctaaggaatttttgaaactttcagtacttttcatctgcttcaaaaagatcaattcacaaatgtaaaatataataattacaacatgcattaaaataatatatgcaaaacagacatttaaaaaatgatattttgaaatactttataaaaataaattagatagcataagggatataagctattattagattgtactcaaataggctcacttttttacctttgggccaagaaatccaaatgacccaggatctccaaacagtcctggttccccctacaagtaacaaaaagcatgccctttttaaaaaaaaaaatgtgattatgacattttatctcattgacaaattatctcattctcattttatctgaatgacacatgctccctgagattctatataaaatcttaacactgttttaggttgcatcagagagttttgtgctctagtttttgcacccacagcaaaattatataatttataaaataaatgtgtttcctctactgtgtatgagtctgtatgtcctggtgcaacttttgaatgatactgaattgcatctactaatgaaaatgtatttatcatctctgtaatggtatacatttacctttaatcctggaaaacctggagatccataggaaccagggtccccctaataaattcacaaaaatcaacgcaagcaaagttaaataaaaatacataaaccaattcagtaaatcatttttccccttatgagattgcttttgggatttttaatcatgcctacaaagataactgaataaaggaaataaacataaaagagattccatttctttacaacatttgctattttaattactctttaatattattaaaaaaaatcatgtcctctccagtgatataaattaagaatatagttttgttgtttgtattgctcttccactttaatttatttaatgtaatgctttcactgagctaaatatctttgaatcattgcaatataatttgtctggagattaatagttgctctatgcattatcagcaataaaaattactattggaagttaatattgcctcattaagtactaaatctggagtcaaataaactcagtgtccatggctgttggggtctggccttcatcgtgactctgtgaatggggatcccattagtgacaggtatgggagatgttgaggcctgatgctgtactttttttttctagctactatccatagaccagtactttcttttgtcaaataggcttaactgaacaattccaagctacaatcacactgacactgagccagtgagaaaatgtcatgatcccatttttgttattggttagctctaagttgtgtacaactctttgcaactccatggactgcagcacgccaggcttccctgtccttcactacctcccagagtttgctcaaactcatgtccattcagtcgaggatgccatccaaccatctcatcctctgtcgtccccttctcctcctgccttcaatctttcccagcatcagggtcttttccagtgagtcagctctttgcatcaggtggccagaatattagagtttcagctttagcatcagtccttccaatgaatattcagggctgatttcctttaggtttgactggtttgatttccttgttgtccaagggactctcaagagtcttcttcagcaccacagtttgaaagcatcgatgcttcggtgctcagccttcattatggccccactctcatatccatatatgactactggaaaaaccatagctttgtgtatatgggactttgtcggcaaagtgatgtctctgctttttaatatgctgtctaggtttgtcatagcttttggaacatgttaaatatcataaatgctattagcaaaatccagaccgtgagaaactacaaagtacaaatgacctaggtttcttcaacaatagcaaaaaactgcaaagggtgtaggggaggtgaagggagtagaatccaaatctataacatctctccatagatttaaagagacctaagaaacatgcatgggcttcccagatggcg

SEQ ID NO: 64737 - DNA, 682 bp, Bovine  19866880877559
  misc_feature (1)..(1): n is a, c, g, or t
natataccttgagctgggtgctgctctaagctcttcctatgtattaactgaattaggattcaccgtaactttctggaagtcctactgatgttcctatttttcagatgagaaaaccaaggcacagaggggctcagtaacctgtccacttacagaaggtcacagagtgtaaactgggtctcaaactctggttcttaaagcccccagctgtccttcccctttcacttaagcagttcttaacacttgttttacaataagtctcagactaatcaatgagaagacagcatccttaaccatcccagctattctttctgcttttccagtaaacttgcagaattcttttccttatccttgctacagtccttctgaagtagtgatatattgactatttcatccaaaggctaaaccaagactaacgcctaagcaaggaagaacaaatagtgaattcattaactgggaatctatttacaatccccagggctcattgtgcgggcagtgcttctgtatcatttagagttgctaataaatgaaagtctttgcatctttccaagcatcttgatatttaccagtctcatattttaccataggaagcggcttcaacaagcatattcatgtgttgacagttctaattaatacaagtaattagtcctgacagtagaactgtaaaaagaagacccattcataa

SEQ ID NO: 64738 - DNA, 1000 bp, Bovine  19866880889948
  misc_feature (1)..(1): n is a, c, g, or t
nttgctgtaaagatatggcatattgcagatagtctaaaatcctgagtggtggttcatcatggcaaggcgttctgtctctagtctttgtattattttcacggtgtttatttccttctgggacgcttgtctctgtgaagcccccactggtttcaggtctgttcagttgactctgtagggtggaggatacacacaggttctgagaattgccttcagttctgttccctgatggagaagcacttgaggcaaagcagcaaacaagaagggaggaactagtgcagctctactggatagacatattggctgacgcagggtcccacgaataaatgacatttctgcatttttcaaacatgttttggatggagattacatgtagctaatgaaattcataagaaaagactatgagacataatgtaggggatatggtttgatcccttgtcagggaactaagatcccacatgcctcagggccaaaaaaccaaaacagaaaacagaagcaatgttgtaacaaattcaataaagacgttaaaaatggcccacatcaaaaaaatctttaaaaataaaagatgtaacacacataactttctgtatttgaggcataacacacatgcctgaagaacgtatgctgtatatgtctgtaaaaaatctaggttaaacattttaaattacacgtgctattaattacttctggaatcactggctttctgcatgtgtttctgtagcctacgatgacaatgagagctttgtgttcatggcctttcaaagactgatgattgacttgtgatgcaaatgttcctagggtgatcacgaggatgcagccccaggtgataaagggcctcctggaccgccagggccccctggcagagcgggacctagggggcccccaggcctgggatttcctggccctccaggagacagagggcaaccaggagctccaggctacccaggcaacaggggtcctgatggtcggaagggtcggaaaggtaactgaatgaactttcttg

SEQ ID NO: 64739 - DNA, 1218 bp, Bovine  19866880892307
  misc_feature (1)..(1): n is a, c, g, or t
naaacgggagatgtttccagccctgcgtacagctgcggggacacccgagggaaaacttcactgcatcaggctctggttgggtcacttgtcaggtgaggctgaggagcaaggtgactgccagggtccttgctacaactctggagtttgacgactggaattcaattgtgcctcctccatgtatggttatatatccttgagcaaggttactggccctcagcctcagtattcttatctataaaatgggaatagtaacagtacctcctctgttgggttgttgagaggataagaagagatgatgcatataaaacgctgagtgccaagcatgcagttagtgcctgatggccaatggccgctgggacttttaactgtaacatcagtgagaatcacgggttaaatgtctgcttgttactatcactgacaaagacagatataaaataaaattaccaatgacttcttaaaagataagagcccaggaagtctctggtggtccagtggttgagaatctacctgccaatgcaggggacacaggttcgattcctggtccaggaagacccacatgccaggagcaaccaagcctgtgtgccacaactattgagcctgtgctctagaacctatgttccgcaacaatagaagtcactgcaacgagaagaccatgcactgcaactaaagagtagcccctgctagccacaactagagaaagcctgtgtgcagtagcgcagacccagtgtagtcaaaaatacatacaaaattttttaaaagatagagcctaattctgtttgaggaacaactgggagtgttttgtacaaagtgtggggtcactacttattaaatatttgcccttcaagaaacagatacaaaaagggtaattcgtgagccccacttttgtaaccagaaggagccttacaggctttgggaaagttggcgaccttcttttctctgctgagtaaaaccatgcattgaacgtttacagacttaggtgaagtggcctcgctctgatgaacttggtacagaatattagtatttatgagccttgcttctgtgctcctgtaaatggaggtcagccctcaattttactgaaagaaagagtgagcatgcttcaaagaacctcaggaacagtgcctggtttaagaagatttagctcaattatggcaccaatggtgagatcataagatttattgacttgtggttcttgaggaaaaatgttcagttctctacggt

SEQ ID NO: 64740 - DNA, 1804 bp, Bovine  19866881231784
  misc_feature (1)..(1): n is a, c, g, or t
nacacacaaacacacacaggagcttccatctctattttcaagtaacagtttggtcaaatagaacccagctaccctggctgatttggacttaactttctttctgatttctagtatcagcaaagctaagcataagctgtaattaagagaaaaaagcaggaaccgaggagacaaagtagaaatggaaaattaattaagcttaagtgaaattagtttcgcttaatagacacacacaccagccagcaacagtaagcttatggtgctattgatgtgaattcataagcccttaaaaagtctctagttaagattctgcctttgaaaatgtttcttatcttcagtcgccacagcttgatgaaacatcataaagcaaagtcatcctcttgttgacttaagggtctcacaacatcatgatcatctcctaacatgaaagaaggagtgaaagggaaagtgaagttcagtcatgtctgactttttgtgacctcatggactgtagcccaccaggctcctccatccatgggattttccaggcaagagtactggagtgggttgccgtttccttctccaggagatcttcccagcccagggattgaacccggatctcctgcattgtaggcagacgctttaccctctgagtcacccatcaaaaggtgaactgctgcatctgccgaaaatgccacagtaaccactgtatcatctcccatccccaaggacatccccagcccataacaatttttaagtgattaaaatagaaggcctttgtgaaatgtttaaactttaatgactcaggttttaaatatgctaggaacaagctgtaatttttcttgtaatgaatggtcaattttcttctcaaagcttaaattctgtggggcatttgaatacagtgtacattctcatctaaaataagcatttttgttcttcacaagatctagaattaaaaaaaaaactcatttgtgcgtctgagtaatgtagtctatagtgcatctgagtcatctacagtctattagactgatgtttaagtgttcactatttatgtttaaaatctgtgaaaattctataaagacttcacattcattgacatgcagaaaagcaagattatttcttagaaataaacaacaacaacaacaacaaaataagcagcattttttctctcttggttcctttaaaaagagtagtaggtttgtcctcttatatcttaccaataggtaattttttacatttatattttaactataaaccacttttacttatgtctaattggtaacatatatctaaaaagtaatccgatgagagggcttgtgttctgagcacccacctgattttgaaacatatttggaattaatgttgaacaacagatttcaacagcatcatatttgcatttagtgctaaataattctcaagtgtgggaagctgaccttgaatttttaaggatgttcagcaacatccttggtccctgctcattacatacagtgtaatccccccacccagttgtgaccaccaaaaacatcttcagacattgccagatgtcccttgtggtggtaggcaggaaggggtggggagggtcaccccctggttaatcaccaccaccctatggcccttgctaaattgtgcttgctctggaaatgatccaagctcctctttctcgcttgaataaaattaaaatgtttgaagatatggttctcccttgcccaaagctgttattgaggctcacagcatacttgtcaatatcagctagtatatgctgcttcgtggtagaaaatgctatcttctcagtgatggggaaaaaagcatgcatgggttttcaactgat

SEQ ID NO: 64741 - DNA, 938 bp, Bovine  19866881279117
  misc_feature (1)..(1): n is a, c, g, or t
ngtgagacagtcagaaaaaagcttatccctggagctaacggctccatatacaattatattccggcaagtgtggctttgatgtatgtaattctttagtaagtatgaataacttcttaggttatttagcccaagtgtttcttaagcactgttcagtttactggagacatttcatacagattttcagcagatgctggcaaatctaaatatttgttcagttcttgagattgtttgctgaggacagtactttgtatttttagataactgcgtttgattacatgtgaccttattttgttgcaaccaattgtttggtgttctcaaatttgtctgagatcagtacagtgagaactttttcgttgtcttttccattttaatcctttccttcatctgataattaccattgtctaaagaactacaaaaagggccacagtaaaacaagacacacatggggatcgctttttaaaaaaaactaatttggaccactgatttaattatcccgtcaaataagcgttccccctgagttggaggcagcgtctttccaaaccccatcttcaggcacgggggcacagctgcatcttggtaggagacacgcacttcagtgtcaggagacagctgagttttcacaggtcccccaagaaccatatggaaaacagcccagtgtttacacctcagttccagagaaaagccctgtgcggttatgactgtctgacagctgcagagactgaggcacgaacgagtaagtggcttccttcggggacaactgagacacgcaataaatgacctctgctgatgtctggactgggtgagcctgtcgcccaggtagcagtctaggcagcccacagctctgttcccaggacccctcagagttcctgggacaatgcaaattcttgatttaggtgttttttttttttttttttttcctatggcaaaatactccccca

SEQ ID NO: 64742 - DNA, 690 bp, Bovine  19866881337018
  misc_feature (1)..(1): n is a, c, g, or t
ntttataggcttctttctattttccaccttctctggttctaattcaagctgggttagaagggatgtttgaatatctatttaattttaactgaatcctctattgtttttcttcaaacccctctagagcagctagtaatataacttgaaacactccgacaccatctaaatagaggcaactgtaacttgttctgataataattgctcagagtttaatggtatattacccagaccattcacttgatttctcatataatcttcaggaatttcatctgtagtgtcagaactaagtgtatctttatgcctcctctagttacttgctataaattggatatttaccagtgagcaataaacatctattctattcagggacatgatggcaaatgagagcaaagttgcttcagaaataaagatgagacttggacgacaaccaaagcttcaggttctgttgacacatgtgttcaggtcatttctatctttttttattttattttgttgatgtcatttttggttgcactgggtcttcattgcttcttgtggacttctcgtgggcttctcattgcagtggcttctcttgtgtcagagcacaggctctcggctcgtgtgcttcagtagttggagcacacagccttattccacaaggcatgtggggtcttcttggcccagggatggaaccccgtgtcccctgcattg

SEQ ID NO: 64743 - DNA, 1058 bp, Bovine  19866881816957
  misc_feature (1)..(1): n is a, c, g, or t
ntgccccgttgtgttgaaaagataaattgcatggatattgttcgcagtcaaggaacaaccaattaaacatctttcttccccctctccattttttccttcttcctagaggactgaaatcctttggaaatgtcagcaggtaaggacatctcctaatacgtgttctgatcctcactggtcttgataaaatgtttaaggtatttccacaatgtgtagagtttagtttgtaactaaaaggcaagacctgaggagctgagaatttctgtgtctgtggacttttaggattaaaaactaatcctaaagtatttaaactatttacagtcacacctttgtttggaaatagtaattgttatgatctaggcaatggagtattacctagttccatatatacaggtaaataagttaaggaacttttccccacattgaagaactttgagcctggtaatacgtatttatgatatattcgatgaataccctccttgcaacaacagcaatcagattaacttgagaaacgaaaacacaacaaaaataggaaaagaatagaatcattcttctaagcccatcttgcacattatctcatttttctttgtattttggggtcaaaattatagtggcagctgtaatagcaccctgtactgatcggggcaactcagtcagaaaagtttaagttaagggatcgtttattcctcagaaactttaaaataatagctttccatttcaagaggacttagaccaaccattcttaaattctgttgatgcactttttgttgttgtttttttagagtgatgaagggcccagagccgaggaagaaattccattgctattctcagatgtatatagccaaacatggataaaaacaaggaaacttttatagcactgtatattgttgaagtcctcttggttaaaaatggaataaaacaaaacaaaacaaaaacattgtgggcagcctcttttccttgatgcagacctatcgggtagggctggatgatttttcttggtctctttcccaggttgttttaatgcactgtgaatgatattaaatggacccatggtgaaagtg

SEQ ID NO: 64744 - DNA, 1058 bp, Bovine  19866881839607
  misc_feature (1)..(1): n is a, c, g, or t
nctaatagcgtgcttctttcaaggaaccacattcttctatagaaaataaggtaatgctgttaaaagattaaaggagagagatctccaatgcagcttactcttgtccctgctctcaactttccttccttaaatccgatcatctgcttttgtaaaaggaaccataaaataacatccacgtctgagtatcagggagaagatttatcctttccttgggcataatccactctcctccaattgagttagcatctggccaaccggctgcagggatttggtgccacgacacatccccaggcaaggttttttaattccccactgcagcgaccctcaaataacgcagggtcaccactcccctccccagagtgaggcacgaggtctcagcacgtgatttcatcaccaaagcaaatgcatgtatttttttttaatccctgcattttatttatccccacaaaataactaacaaatctctgtttcctaaaggttctttgttctattcagagttacagcaaccttttataaaatgcacacaaagatttttttttcccccacaaatgggacatttcagagaaggatgcccatttgtttgtttgtgtttctgtctgtctgctttaatctcaattttgtttaatcagtacaacatgttaggacttctgttagaccaagttctaatctaaacacagctatttagaaaaactgctttcttttacatggacagcaaagcaagaacaggtttgtcaaagtacagggtgtggaaaggatatctgctccctcgtggagttctgagtccaactccatcagcatttctctcccaccaaacatccctcctcccactgttcgcagcaaataaggatttgggtgagttaggtctgttcctgcaggtagtcaacctgtctggaacgtcaaaagcaaaatcatctgtgatgtaaacatttttcagacaaagtaaggctgtcttttttttttttttaactcaaaagacaagctaaggcatctcactgtgtttgatgctttatgacatgtgccataaagagcaaagcacataaaaaaaaaaaaaaaaaaca

SEQ ID NO: 64745 - DNA, 1648 bp, Bovine  19866881855044
  misc_feature (1)..(1): n is a, c, g, or t
ncttagtgtgtatgcccagcagtgggattgctggatcattaacttgtatgaaaggaaagatggtagcttcatgcagccagggctgggagagaaagggaagcagtgaagtatgcaagaacacatgtaaccattgaaatcgctaattaacaattcctaattagcctgaactgttaacgctttgtccgaaggagagtggccacttgtctctgtcattacagggactgattacaagttctgttccacatgaacttagatgcagggaactctggtcctgctttgagttctctccttgcttacattttgtgataaggtgcttctggcatattcatctaaaatgcaacacgcatgttctttcttccccagtagtgctgggatagggaacataaaaggcataccttgtgtttgagtgccagttgacacctctgtggagttagcttcgtagcagtctgttggacttttgccttgggaattaggaatgaggttgaggaataacaatttggaagatgatggttacattgtctcctgtcccacatgttcttctagaacttcacttagagatggggtctggagctcctccccctgaattgagtgggtttgtggctcattgcagtcaatagatggcagcagaaatgccatgttacttctgaagcaagaagtcctttgccttatgagtggcaacactggcccgtggagcccacattccctggttcccccatgctgtgagcaagcagcacacaacacgtgagtgaaaggctgttagaaatagccgtgtgtcagcccagcctcaacatggtgggggcgacaccagccacccgtgtgcttcctgaattcctgacccacagaatctgcaagtggaagaaagcaagtgttattttatgcctctgcatgtggggagatttgtcctgtgtaatgccagacaggtgaatgaaaaagaagtggggaaagtataatgaaaagcagaggagtacaaaggacagtatgggagagagtctggagtgaaggtggaagagagccaaggagggcagcttggggaggaatgcatgctgggatgctgtggtaccgtgggtcacgacagcatcacccatcaggtaacagggctttaaagcagcggttggcacttgggggttctaatcctttaaagggttctgaaatcagtgtagtgagacccaagcagcgtttgaaagagagagaaaggaagagaggaaggaaggaagggagagaggaaagaaaagagaaagacagaccagtgttgaatgtggtaagggtgttatttccaggtacttttgttttaggtgtatgtgtgctgcatttctaaagtgtatttttagtgtgggacagtacaaaaatttggggaggtgctgctttaaagcagctattagttgcttaaactagagttaaatgcatttactctaaggtccgggacatttattgtcttcagtggaagagctttagattgccgggtcttgagggacgatgagaataggctgtgatgacagatttctgccaatttattgtttttcattagaataagtagtaattcacaagacttattaattaataatcatgccagctctccagatagctgtctatatggatatgtgtgctcacagatttagacttcacctacctaaatcagaattgctagtaa

SEQ ID NO: 64746 - DNA, 1308 bp, Bovine  19866880414592
  misc_feature (1)..(1): n is a, c, g, or t
ntttctaccttctgttgtgaaatgctggtaattccctaggtacgtcaggaactagcccgtatcagtgcctctgccagggtcttccttctcacggatgccgagtccctcttgtccacttgacaacctcctgtgattctttaaagtctcaggctctcagagggctcttttttaggggaacgctcaggacatgaaggcgatcttgttattttcctgcagggactccactgctgttcctcgtgtcccacaggtggtgttggggcccaaagtctcccccatcattagttttaagccatacttcacagtgaccttaataaaaatttaaagaccatataacatacattatccggtaggtgtgttaattagtcttatatatgacatcatctctgctcctgggattttttatggctgtcatatatctcaaaggaaagacttagccattctcgacataactacataaaattctgtttcgtttgccaggcatgacaaaggaaatatatcttctgaaacatcaccatgtattttgaacagtgcaataattagagaacaatatttggagaatattatctctctctaataaatatataaactttcgattattacttttcataattaaagctgatgtgccatcatttcaatgatgctttagtgtgtcgttttaaaacatttttaatattttgaacaatctctaaaatgtatgtataagcacaactttaaacatacatataatgttgtcaatttttgcctttaactcaccatgccagtcctctgaaaaagtctgccagtcttcctgatattcgtttggtatatagatttaagaaatgtagctgagtctttccagtttctcttagcatctagcagtttatgacagcagcccttactcttcaaacccgtattgaattgtcttgaaaggaaggcaatagaatggattggaaatttagaatattttttgaaaaatcactcgagcattatttcagatagtctgagtagcgtctttagaaatgcgtgcatttaacaaccatagatttagtgtgtactgtgtccaaaaaatagggtcatgtaaaattaaaaatatatcatatttttcatctggttcatatcagtttgattggttttttctgtttccattgtaaattcctcaaggcaaagaaagaactgtctctatcctgttggtgtgaaccttcttgtagcaccttgagtgtattaaacgtcatgctttcccaaaggcaggcagataatttaaccaacagaataaatgtacttctcctactttccattagaattttaacataggtcttcattctcccaaga

SEQ ID NO: 64747 - DNA, 2935 bp, Bovine  19866880491960
  misc_feature (1)..(1): n is a, c, g, or t
ntgtgggagcgattccaggagtttatacacaaacttgggtgattttgccaagctcctctctctccttaatgtccctgcttcaccccactttccctgaggcttgctattttagtgctcccaccagaaagctagggctttgttttcctgctctttcccacaggaagcatcctcatctacaaaccaagtggtagggagacaggggaggcaaagagcaatggaagttctctccacaccctcttgggaccagttggagaggaagcctcatctccctccgagtatcagtggtctgaagcgccctggttccttcgctaacactgcattgccaccgcccgttcagtgattacctaggcactggggctcaagacagtagagatatttttcaaaagagatggatttcctgctccctctgagcatccctcttcctgcccctcaagccagggctggagggcttcttttggagttttgtctgcatgaatgaccaccttgtgttttgagctgtcttgagttgtgggttagaggaagataaaatgctgataaactcaccaaagtttcagagactctgaattcggctctttttccccagtttgcttgctactgctactttcagaggcttccatttgcttctccaggcatagcttccctgtgcattctactgagcttctgtagcttcattcagtggaagagacaggctggaggaatgtgtgtccaccctggaattgaaacccttgccgcctatgttttcaggttaatccttggaggtgtatattactatggatggaatttgggtagggatgtcagatttgacacagaatttttctctgacactagttgtgtaaacagacatgctagttggcttctcttgagtcttacttcccctccttgttaagtgggaagtcaatgcatgtcaccgatgtccagttccagaaggtaacgtgctaagtgcctgacatagaccaggtgcttcatttctatccatttataccctgtggctcagacagtaaagcatctgcctgcagtgctggagacccggctttgatcgttgggtcaagaagattccctggagaaggaaatggcaacccactccagtactcttacctggaaaatcccatggacagaggagccttgtaggttacagtccaaggagttgcaaagagtcggacatgactgagcgactttacttacttacttacttatagccttctctcctcttctttcccctccaaagctgctctcctaaaggcatggtgggggaaatatttggagtgtgaagagcctattcaacctgattttgccacatcttgtgaccagaagtggttaaaaggggaaaagagtccgtggctggaatagaaaagaatccatggctacataagcttcaggcaactttaaacatgagaacctatgtttctatgcaaacagggcatgaagagttttaaaaacagcataaaggcatcaagggagaaaggctgagatgcttctgttctgtttaataaatatgtcattagaagatttgtattaatataccaccactgctattgacatttcattataaacgctttagatatgacatcaagaaattacaatatacatatttaaaagcctagccttacattttcagcactggagataaagtgggatataataggatctgatcaatcatttagctgacttaaaaaaaaaaaaggcaaccattacttttaggagacagcactggagtggtatattttaataaacaaaaatgctatgagaatcttaagttgaagtgtccaaacgctaaatggaaatcctgcagggttaagacagagccttatcttacccaccggcgagacggccttttttaaggaccattctcgaagcagcaccatgcactctggggctgttttcagtgttgagtgcaatgtgggagcgtttggcacggggtcttccttcctttgagatcccgggggggggatgtgttctcgggtttcagtaaaagcaagggctgggcatctcctgagtgaccaccctatctcccttcatcacctccatgaatcacaacgctcagatccaaattcacagcctgcctctgttcaggagacaacgcgtggcacgcattcatgcactgtgtgtgctgaccttggggccggttctgtttgcttgtttgtcaggagcacacgttcactcaccctatttgagaagaagagacttgggaaagaactgctctcctgatctctagtctcgccccttcctcacagctgccaagatgcttgttctacagaatctgtctaaggctgtcatgcttcggcggagaaagtcttcattatccccctgctgttcaagacactgggagccagaggggtgcagcagctgggagtgtgcactcgagctgccccagccgagcttccaatccagatccaccccagcgtgcctcgggaagctggcccaactctcagagttaacgctgtggcccctctagcatcttctcccacttgtccttttagcttaggtctgcctgggatatctcagcccatcccaatctgagtattcttttcttcttatacagctgtatgatatttcctccccctcaaattcctacaaactgtttctcccaccaaaaatgccctcctcttctccagttcaaaacactgaagctggccttcgagtgataacctgcacactctccagtggtctggaatctcctcttccctcactcttttctgtagcagtttgtctctgcaattcctctactaatacatttatcttatcaatttgataaacagttggttaccatttccagctatacaaggggttggataaattttagggggggaatgttaaaacattaaaatgaaacatattattttgctcctgatagagctttacagtcgagaaggagaaaggcaaaaatttggagtccaggagagaacccaaatgccataatgaaatagtcagtgtcaca

SEQ ID NO: 64748 - DNA, 1405 bp, Bovine  19866880503357
  misc_feature (1)..(1): n is a, c, g, or t
ncttgaactttagcatttccgacctccaggactatgagatagtaaatctgggttgttttaagccacacagtttggcagtttattccattaacagtaaatatgatactgtttgttgagttgtgcctgtattgagtaattgacattcatttattaaaaaaaaaaatgtttgctgagtaagcatgatgttccagaaattgtgccaacttctgagggtacagcagtggcccaaacagtgaggagctaatttatagtccagtgagtataaaaataagaaaacagctcaataagctcagtattgctacacccattctagagacaagcaatgaaggcaaagaggagtaaactaacctcttcaaagtctctgaattataggtggcctggacaagctcatctgtctcacaaaaatcagtgccatttccatcactttcccactttccttagggacagttcaatgatgcagatctaaaattctttcacacacataaccctcttatattcttctaaattccctgaggagtgcatacatgctttcctcggatgggacaggggccatttctaaagctgttttgaagcatagcacttctcaacttccttctcctttggaccacagtcatgtaccttgttataggcaacccctaatattttgattattttgatgcaaatccatcacccataataaattcacctgctttccaaatgcaatagattttagaagcacgaaagcaaaaactaagtaagccctgacagtctttgcaagtgtccgtgacaggagagacctaagtggctgaaagctgttttcctcactgccaatctgccagatgattttccttgcacaaacacatacccatccggtcgggctaatgcttgccttttcaacatatgtgagcaaataaatgtaattacgagcaagatgtaatcacaattgctttgctattaaagctgctgtacactctcatggcttggttaacaatatatgcagaagggtggaattgccttctactctcccaggaagaaaaacatgccagaagtatggcctcttttatattatatctgcgaaaatacaatatttaaatgcagaatttgactttccaagaaccgcaccagaaaaccttttaacggaaacagcagggagaggaagctttttaaatcatgatactccatgaaggattatgagaatggaggtcatcgcatgagacggaattgcaaatacaatgaggaaaatctttttcctctgtgtaaatacacggggacaatttattcttctctgttgagctatcagggaatattttcagcttctggaaaaagaaaaggaaagaagccaccgtgtccaaatggatctattgagtgatgtgcttggctggtacctcataagaatggtcggcttcttacatactgaaccaggctg

SEQ ID NO: 64749 - DNA, 4507 bp, Bovine  19866880503575
  misc_feature (1)..(1): n is a, c, g, or t
nggtggagactttgaagatattgctagaaagcattctgaagataccaacggtatgcagtgacctgttgctccagaagcaagttcatgggtgtggtactttgcactctgtttattgaggttggtcaatgggtctgatagagattccaggagtggaggccgatagggcaaagggacaagacacctggagtcagaactcctggctcgtgctcaagcgttgactaaacttcctggtgtcaatctcttcatttttagaaacaggtggagatgatatgaacaagcttttctctagccttatttcacccagggctcacagcagcagctctgagcaagtgtcttgtgccttcagggcctttgggtgggcctcatcattctggtgataaagccccggacttcagagtagcccgtggggcctcttctgggaactctcatccccctccttctgctgctgctgctgtcctcggggccccgtttgtcacggggccgccatccctggggtgacacccaggcccactttgcctgccaggccctcctctcccccgattctcgtccctgcggtcctttcctggggacagctctagtggccttcgcgggcctgtccccttctgggcatgtcttcttcgccacaccactcttatagtcacacttttgtgtttgtttgtgaattagcctttaagaaaagatgaatgatgaactccatgaggtctaggatcatgttgggttgtggtggtcattttattcctaaactgagagtgtgtgataaaggcaaacacttggatgaaggacaggaccgatgaagggagggattgagagagagagggattgaagggaggcgtggcgatcctggacgcagccgacttttctctgaaaaggcctctgtagtcagttactagtcggtgggcgggtcaggtgtgagcccaaggcagtgtggctcctctgaagcccttccagttccccaaggccgaatcctcatggaagccccattctggtacttgaatcccaaaagaagattccgtactttctgagctctggccaccagaccatgtacattatttattgcttaggactgagggcttgttcagcgctcaccccccactcttttatgacatactttctggatcaaactgtaaaccagcagagaatgcttagcaatcattaacagctgttcttggaaaaggactagatcacataattgtaccttttacaacatgcaccctgatcgctgttccacctccgtggccatgcatgtcctctggagctggaagcatcgcaaacaagtcaggagcaagaaggtggggaggaagacccaagaaacaattgactcattataaagttgctgagaagcttagggctgcggcattccggttggctgctaagtgaatatgtaactactttatatatttcaacaaaattaaacttaaacctacagaattaggtttattaatttctgtcaaggctcaatgggggaataagaatggccattcattatggacacacaattactggagacaaaaatgaagcccagcactattaagtataataaaaatgttgaacactgaggaaattttcattaaatataatctattctttatattactacacttaatccttgctgtctgcttctctgtttttctccaacctatttaattttattacttaactttttataaatgtgttcttaatataattatgattaaatatttgggaggagaatgttagtctcttaaaaaagagaaggaaagaagtctccttccatgtcctcttctcttcactcctacgatggtgaaaaatgatgtttttttggaaaaagcaagtgctaagtgggattttattgttggggcaaggccggagcatgagaggagggacggcaataaatatgaaagaagctctgatcagcagttgtaggagagctctttatattacacatttaaataaaagtccattgccttactaaaaatgtctgtgaatatttgcatggccaaaccatgtaattaaaagatgggcccagctaatgttattgcttgcactacaagaaaacatttgtgatcctagtgtttatttattttttaagtcacgatgtgttcttgtgtgaattgcccccttttattaggtgctaggggtggattgtgggaagcgaaatggggaatttcattttctttgccaaaatatggctgtgtcacccgtgtctccaagcttcttcttggagctatcatgatcttacgtatttttcttagcacagctcaagcaagaagaagccatcaatgcaagtgtggcaaataggggttattgaaataaaaccaggactcaaccttcatccacttacaactgctttaatgacttgtgttcagaacagaagggtcttggttccacagccatgtcatttggggagctcagttctgggcaccatatgttcggttttaagactagtccattttctgttttcttccagttaagtaagatgagaatcgagttttcattcatagcaatcacacaaccctgcccaacttccagggcctactacatgtattcttatttcccagacccgtcctcccaagaggcttatgtgtacctctgctcagccagatatttgacatttacggggtaatgactgtgcaaactcgtctcagagctggggcctgatgttcagtatgctgcctttttcgctcagggctttgtttctttggaagctgacagtgctcgtcatcattgttggtgctgctattattagtttgcacagttcatgacataattagtcttcccccatccttctcaccactggtgtaaatcctctcaaactaggatactctatcgatatcattttcttggaaaatgctctctaagctttctgacctggtccagcctgggttggtggctcacatgacggctccccgctgtggtcttgggatctcctttctccgctgttctaagcgtcctttctgcctctcattctgtgtctctgtttcctaggcctgtgccctcctcctgattgctccccatgttttgtagagcatgcgtgcctgagtgctaagttacttcagtcctatctgactctttgtgaccttgtgaactgtagtccgccagactcctctgtccatgggattctcctggcaagaatactggaatgggttgccatgccctcctccaggagatcttcccaacccaggaatagaacctgcatctcctgtatcacctgcactgcaggcggattctttaatgctgagcccccagggaagccctgttttgcagagcatatcttcttgtaactttcaaagatggaaagcatgggatttaaactccaggaacttgcctgttagggaaatcttctctcccagcactacccctgtttctctctagaacctcagcttatcttagtgctctgcatagtctttatgtgaaccgacagttgacagtcttcattcttactcactggcttacattagtttttggcatcccccgtaagaaagtaaggtcatgagtagtggggacttcatctgtttcgctcactgctgagtctcagtgccaagaacaataacagatctattagacactcaataaatgttcattggataaaggaattgatgaatttattagcttgcttaaacatatgaatcaacacagaacaggaggtgctggaaaaggctagccctcactcgacatagctcatcgttaggcagagggctgaagtgattctgtgtgaacaagaatatacgtcagcctttagaaacgaagtctccatcggagccttccgcggggccccctgctgctggcacctccagcacgtggctcccctttgagcaacgacacagaaaacctggacttcaggcacttgctggaggggtttgccattgtcctcctgccaagagtgcagacagccaaactccagagaggcaggcgaaggggtgcgctccccagggaatcggtattccagatgagagtccttgggctcttctgaatgtatatgtgggtgtgcacagatgtgtagacatggggaacatacatactgatttttttaagtattttttttgttttttagagtgttgtagtatgggacttcccagatggcgaagtggtaaagaatttgcctgcaaggcaagcatcacaggagacacgggttcgatccctgggtggggaagatcccctggactaggaaattggcaaccccactcccagcattcttgcttggagaattctgtggacagaggagcctggtggtctacagtccatggggtcccgaagagttggacatgactgagcacacacgcagtatacaatgtgtgaaaactgattttaaacatagaagaaataagaataattttaaggacagaaactttgtggtttttttgtatactctattgggtcactttcttttcagagaccctaaggtagatcagtatttgccagacttcagggtgctgagaaaccatctggatggcttcttagaatgtagatttccaggctcctaacagggtgactcattaggatgtgtgaatctgcccccaagcactgcagt

SEQ ID NO: 64750 - DNA, 2551 bp, Bovine  19866880582970
  misc_feature (1)..(1): n is a, c, g, or t
ntgaagaccttacaggttgccgcaaggaatctttgtcctcccaggaacctgcccatctctcagtggagcacgatgtggagagcttcagagcaagggatttaaagttgggtttctggatgctaagcctgtctgtctcgctggctcactgtcagatcttgatcaagttattttctgtgttggggcttcagtgttctcagtaaaatgaagacaatcgcagtgctctcctcagagcctattcacagtattttccagagttaatccgcctaaaccatttaggacagtgcctaatacatggttggggttcaataatattgattcacagctgcctcccggtcttctgtgagtttctgagggcaggcgtggtgttgtcatccctgggaaagattttaatgtgtgtaggtaggtgctcagggcctctgtgataagtgaacagtgaaccaggctatccttttctttcattatgcccaactgaaggcaaatatttaattttaaaagactatgaattggggtagcatatatcatgtgtgctagagaaatgaacactttttcattcattcagcagatattgtgaataccagtaatgagctggggagtccattatgtacaggaagtaccatggtgtataagccaggagtttccacccttgtggtagttatattttagtgagaggagaaaacaaataacctcaagatagtagatggtgatgcaccatttgaagattatagctatacgatagtgtttggtcgaactaggaatgggatgagatgcagctttgggctggtgatgcaactttgggttggtggaactcccaactttccctaaaagttaggatttcagaagaaacctcgaggagaaaaagtcagtcatttggagaagtgtgggtagagtctcccagagagagaggagcaagaacagagacagagttttctggaaatgagcatagagtttaaagacatcaggaagtcctgtatgcctggatcttgatgatccaaggggagaaaaggtagacgggctaaatgaggtggtacttctgattcctgtttccctctaagtgcagtggataccactagacatggacgggaagtaacctcccttccctgtgttccatttttgggttgttttattgctgacggccacccagcacagccatgactcaggaaatcctgatcttctgaggtatgcgtgtgtgggagtaggtagtggtggtggtagtttagggctggtggagagggtcctcctctgacaacgctggaaatacattgagttccccaagcaaatccagatggtccaggttctttctgtaccaagaatcaaatgatgatgatcatccagtgacagtggcggccactggtttcattttgactgcgtgccgggcaccattaagtgcctcacagacatcgtgtttgattctcacacatgcccaagagctcgctgctgtcggcatcagggttttacagataaacatgctgagatctgcgaggtgaagtgcctagcccggaggttaaccctctcgggatttgagtccgaagctctggaccttttatttccagcacatttcaaagcagctcatctgcgtctcctcccatgaagtctccccagacggtgcagatagatggggactgaaactcaatgatcagttacaagatgttctctagaacttgcggaaatcatagggtgggcgagctggttttgcaacaatggtcctaatgagccatttagcagcgagcatgcacatgtgtgggagagtcggcagcacagcccgcccttggcacacatttgtgtcattgtttggtgtctgtacacaacttgagatttccaaagtgctccccgaggaagagatgaatggcctttctcagattttatagatttgggggtgaggcaagctaacgtcggcctcaagtctcacggcaagaggatggaattttccaagcctcaaatggagaagccatgttccatgtccttctgtctaaagggtgtattttgaccttcagctgaggtcagcatacccaagagaggttggctgtgtcatagcctctcagtgacttctttagtttgtctagcaagcattcggtgcctctgaggtcttgggcactctgctcagtgtggggagtgcagggtgaataagacttggccctgcctttgaaaagttgtcaaattttcccacccagacgtctgtcctcattcaacctcagcgttcccagcccagtctagtggtgatagggatgtaggcactgacggaagaccacctgcgttcaaatccagactctgtgactagggctaatgctttaacttttctgcccctcggtgttctcacctgcaaagctgtactatcagtagtacgtaagtaaaataacttacgtaagtaacatgatacgtatagcttttggtttcaagttccttaatgataagtatcacctggaatgattgttaaaaatacagtttctcaggcccctcttgtggaaattctgagggagcagctctgggattcaagaccgtggttttctttgtttgtttggttttttgattttaaacaaatattccaggtgatagt

SEQ ID NO: 64751 - DNA, 837 bp, Bovine  19866880643882
  misc_feature (1)..(1): n is a, c, g, or t
ncagacacttcttccctgtgtaccttccctgtatataccctgagcttggtattgctattattcccattttacagatgagaaactgagactgaaagggattaggtgacttgtccaatgtcacacaggtagtaactgtcagaatcaggacttgaattggatctgagcaccttagatgtctgagttctatggtaaatatgatctactgcctctattttgaaactgtggcccatacttccacccagttattcattctagaatcctcaaatctgtctaattctccatgaagggaacaggcatggctgcctttctatctctgaaaactgatccacaaaataaccattctgaacctgagtctgtcatttcttggggttcgtgattagccagtgtcctgatctatccagcccccttcctccccacctccatcccggggagaaagaggggccattgtgctccaggtgccccggagccccactctgggggcagtgaggggccccagggtgcagggacccgcgtggcagtctggaccacgtggcggggccgaggcttgctcacacaagccgggcagagtgatttgcaatcagttgcaagtgattacacattgtttcccgtggatagacagagggagccctgaagggataatgagatgcagctgatggaaaatcacagctgactgtcaacagcgctgaggctttgcacagccctccagtgctgtagacaagtcctctcccctgcaagggccaggagcacattgaagaatgttaatacttagacccttcacggtgccattgactgcagggtcacctgttaagtgctagataatcggggaagggtaggacg

SEQ ID NO: 64752 - DNA, 914 bp, Bovine  19866880659127
  misc_feature (1)..(1): n is a, c, g, or t
ngcttattctcacaagtaaaagaattggagctcggcaatccaaggctggtatggcagcattatgaaatcaccaagggacaccggctccttctgccttgcagctctgctctttttagcctgctgccccatggtccaaagtagctatagaagcttcagccatgatacatgtattcgaggccacaaaagagtagaaggccagaccccttcttcttaagggtcatttttggaagtaggcacccacacatctggttataattcattgtcatatgtctataccttgcttcaggggaggctgggaaagtagtctatttgtagaatgacatttgctgagaaatagacagtggatattagcaatgatctagcatgcatgcgtgctaagtcacttcagttgtgtccaactctttgtgaccccatggactgtagcccgccaggctcctctgtccatggggttctccaggcaagaatactggagtgggttgccatgcccttctccaggggaccttcctgacccagggatcgaacctgtgtctcctgtagctcccgcattgcaggcagattctttaccgctgagccacaggggaagccctaaggatctagcactaacctagtttacttgccccggaccacgtaacttaaaacaggtgggaggggctgagacctaaatcttactattatttgttctcttattttctgcctttcctatactcagcttttctattatcttcacagttgagaaaatgactagtttttttctcaaacaccctttcagagctatttattttcccatttttagcaccaggaccattctctgagttctgcaaagtgttatggggaacagaagaaagggagagtacgatttcaaccttgcaatgcaatcactccctgcttccataaatcagcaggtttttaggagg

SEQ ID NO: 64753 - DNA, 1318 bp, Bovine  19866880745376
  misc_feature (1)..(1): n is a, c, g, or t
naatgtgaccttatttggagaaatggtatttgcaggtgtgactaaggtaaggatggagatgagatcatactggattaaggcgggcgataaatccaatgagggggtcctttgacagacaagaagacaatgtgaagacggaggcagggaccacagtgatgcatctacaggacaaggaaccccaaggagtccttgcaaccagcagaaactggagagaggcaaggggcagtttcactctcagaatctccaggaggaatcaaccctgccaacaccttgatttggaactctggcctccggaactatgacggaatcaattcctattatttgaagccacccaagatgtggtactttgttaggatagccctgggcactgtgggctcagtcgctcagtcatgtctgactctttgcgaccccatgaactgtagcccaccaggctcctctgtccatggggattctccaggcaagaatactagagtgggttgtcatttcttcctccaggggattttcccaacccagggatggaacccaggtctcccacatcgcaggcagattctttaccatctgagccaccagggaagcctaagactgtcctaggaaacaaatacaccatcttaacccaaagccaacatcaccccttacagcaagggcatccccactactttcagcaacaagacagtaagtacctcccaaggaatcactatagttgacagtgtggcctgctggaggaggctcctctcttgcacacagctacctctgaatccatttaactggcatgtacagtgcctgagctgatgctttgcaaaccaggacagaggaggaaaatcaccagtgaggtgtctgacaactgtccctgcattcattcctatgaccattccttctgcaggttaaagacatctgcttgaatcctgctttgcccacttcttgggtcattccgcacaaggcacttagctttcctgagctgtccttctctaatctataagatagagatcatatacatatatattttgctacagcaaagatgaagctaaaataagaatggatcaaaaagacacttagctcaaaacctggcacatagtaggtactcaataattgtcggtttctttcctttctgaaatattgacatatcaggggtgagcctttgagatgagaattatatttggtcaattatgttattcatagtctcccaattatggtaaaactatagatttaaaaatctcctcatggatcaatttctctaagtcaattgaattacagacaggtaaatcacatacctggaatgttaggtccatgaatcaaggcaaatggaagggtcaaacaggag

SEQ ID NO: 64754 - DNA, 1280 bp, Bovine  19866880845799
  misc_feature (1)..(1): n is a, c, g, or t
nacatgattttgagcaaactctgggaagtagtggaggacagaggagtctggcgtgctgcagtccttggggtcgcaaaaagtcggacatgacttagctgaagagcaacaacaacagctgatggacacctttatgtcccttgagttttggagctgtggcaaatagtgttgctgggaacatccgcaggtactcttcttggtgcatatgtgtacacattttagccgggtatatacccaagagtgtctggttttagtagataatgctgaatgggttttctaagcatggttgtcctaatgtattcttcaaccagtcatacaagaaacttctggctgttctgcagcctcaagaaaacaactatgatattttttatccagttaatgtttatattttcaactagactaaatttcatgaggatgagaaccacatgtgccttgccttgttttttttttttcaccatagcatctccagtggctagaacaatgcttgccatatggtaggagacacacacacacatcacctacctcgacaaatgcacaaacaaatatgtatgttctagacactttgtcatattatgatatttgtcttagatttttctgtttaggcaaaatcagtacaatattctatattctcaattactgaaactgttgttatggatgaaaatggagaattagtgagacaatatattaattcccacattgtgccaaactactcaggggatttgacaagtcaatccaaaaagaagccaacgtcctaaggaggaacattttttcaagttccagtaaattttaagtagcaaacaactgtctgtgttcacctcctttagagaggttcctgcactgtcttaatagattgtgtgtctgtacttatgaattagtggtgggaaaagataacaaggaaaaatgtaaaggtgtcttgcagctgtgtgcttcactggggcctcgtcccaagtccacattcacagtcatcaatggaagagctggctctcgttccactgattaatttctacttggtcattgttaatagtcaggttagagaaatgtgtttacacagggcgaaacgaagtgaaaggcacagtacacatgcataagtcatcatttaaacagcatcagaggtgagagggcagcggtattatcggagaccctggcttcctccctgaaccctgcctgcctgcctgcggagagaccttcggttgtattctgttggttgtaataaatgaatgacgatgacgcaagcagagactggaattagaggcagctcagtatatgtcaggttacacattccc

SEQ ID NO: 64755 - DNA, 1224 bp, Bovine  19866880862572
  misc_feature (1)..(1): n is a, c, g, or t
nagtcgtgtctgactctttgggaccccatgggctgtagcccgccgggctcctctgtccatgggattctccaggcaagaacactggagtgggttgccattccttctctagggccctgacccaaggacccaaggaccaaacccatggcagattcttcaccaccgagccactagggatgtagctggcggcgctgtcacacagaagacacttacaccaatactgtggattagttattgttattatccccgttttacagatgaggaaacttaaagagtgccatgaaagaggaactttggcatgggctgtatgtagtgacttccaaagagttgaggatgggcagaggggtggcggagagccaggtgatccaaggccatattgacagcgatgtcctgttgacagctggtattcttgatgtcacatgatgaaaatggcactttccctggggtagtcttcccccactcccataatcccgggataatcatgaaggaataaaaaggcagagaaatcccaactgagggccgttctgtgaagcaccatgggcagactctgttggctggttccagggtactctctcagcagccagactggatcaggcctaatgctccttaaggtgacgtagtaggcacagttgaggagaggatcaagagctggtaccgaaacagatacccattgtctgtcccagggttcaccaagaggcgacacaggaagtcaaaagccaaggattccggtaacaggtcaggaaatggagtgactgctggttcaggaccaagctctcaaacaaaaaataataatatttccccttaggttcttcttggttgctggatctcactgtgggaaagttcgtttggggaaaaggcagaggactagggtgacgccagcccatgaaacaggcgtctctgatcacccggtgtcgggagaagggcaggatttccaccgctattcactttcccgtccaggctgccttgcgatatcttttctgtgagcctttgaggagcaacctgtttgttcattgaaaacaccagccacccttaagggctccttagaaggaggattgaacgtcactgaatgcttgtccattaccctattctaatgaaatgtgttctttgaaagaattatttaagtttatgaaaactggtcaatgtgagaagatgtgattggagtgggggccagcagagttgagctgggtgataaaaatagggagttttgtctcccttgggactgatttt

SEQ ID NO: 64756 - DNA, 790 bp, Bovine  19866880937264
  misc_feature (1)..(1): n is a, c, g, or t
ntctccataaactgtttattttttctgagtcctacaataatacatgtcagacggctttgatagtttccagattaatgtgtttttccccttcaggtcatcacaagactactcatttcattaaattaactctgctagttgcaaggtggaaacgggctgcaaaacataactgttcgcaccaaatcgggagccggcaagatggaattaataaataaaactgatatcccctcatttccgggggaggtggggaacgccgtgttgcatcgcatcttgatttcccaagctcccactgggagcaatgagccccacggttatgtgtgtgccagaggtgagaagctctcacccaaagccactttggtctgctatctgatggagcccacccccttcccatgatgcctctggagtggagctggcctcaccggcccacaccctaattaaaaaaaaggcagctgtggaagcaaaggcttcaccatgaaagtttcatcctccctctctgcggtgaaagccactgccaaccaggcaggctgtttcacacctgtttgggtccccaggagcttcaggcaagacgtcacctgactccacaccctgcctgaagcctaattttcaaattggaaaaccctcttgactaccccatgcctcccaatcatcggaggccctgtctatccaggaaatccatgtggcagcgtggggaaaaagttattacaagcctccagctccccactgtacagaccggaattggctaacgttttctgggaaagcccagatggcaaacttttgtgggtcacgggggcct

SEQ ID NO: 64757 - DNA, 1952 bp, Bovine  19866881122605
  misc_feature (1)..(1): n is a, c, g, or t
nctgtgtatctgtaagcacactggccacatgtaagcactgtggtccacagtacgaagcgtaacgtgcttcagaatcaaatgaaatgctcaaaagttcaacgctgcaagcatttcctaataatagggctttgaaaaaaaagaataacaaatattagccaaccataactataaatgttatcaagcaaagtaaacattccatctgtaattgttattggagatggattaatatgaaacagtcaacatggcagactcctaaagtaaaactcaaggttgttggagggaaaaaaaaaatgctgaactgggtacaagtgtaactctgatacgatggtggctattttgccaagaaaaggaaataccaattcaggaatttttaccaagaattattgcccattccccatggttttttttaaagaccacttcctaaattataatagaatgtggagagagagaagccacttgacttttcttgggtctcctgccatcttttaagctccctctcaacgccttctatgaagatttccttgctgcccagagctcacactgtgccattctttccatcaaacgcagttgaacttctatcaggatatatggcttgggacaacctagtccgagtcaccattgttattcagctgggtgacagaggtctgcagtggtcatcctgtgtcctttcctgcccctccccaatctagtctccctacttcatgcagctggtgtaatccttttaaaatataactgggttcatattacttccttactttaagcccttcatttgttctaatacatgggaaacagtccagacatcttccaaagcctcccagatcctgtgtgacgtggcccccgtcctcccctcgttctcttcactccagaaacgcagaacgcctttcggtctcatgaatgtaccaggctctttcctgccttcgcgtctcatacctgctatgccaaagccattgaaatctcttctcccagctcactgaacatttttaacaatttctccaagtgatttttttttttttaatgggtactcatgtttcagaacaaagagggcagcaagcttgttctggacaggaccaaatcgtagatatttctgtttctatgggccagtcagtctctgtcaggactgctcaattctgcccatcgtacctttaaagccatagacaagacatcagtgagcaggcatggctatggaccagtaaagctttatttacaaaaacagattcaacaacaacaaaaagaaaaaaaaaggaaaagaagccagattttgcttgctgatcataatctgccaacccactggtgtaaagaagttcttaagtagggttatgcttcagaatcccttcaggacgatttttcacaaaacagacatctgagttcctaaagggatgcatatctgcattttttaaaaagcatcatagatttctgatggaaactgcaggatggaaagaagtgagaagaaaatgtaaactatatacatatatatatatattaatatgaagaagaacttaaaatattttcttccattccccagtaaattgagccttaccttggttcaattactgagcccaattactaggaactactgagcttcctattcctagaatattcaaacaaaaaatgagtaaggctctaacagaaatgatgtctaagaacttctgttgaagctcaacgaacaaaatgctgcccatctccagaacgttgtatagctcgatggcgtgatagagcttgaagcctattgtgaagtaatctgagttcaatcccaagtttaccatgtagtacgtgtttaatcctaacatttttctcaagtatctcaagacttggtttgcttattaaactggggagaggaactaatacttgattggcacggtgccagggtggacacacgctacatgcatgatgtcgtcagcacaaaccctggccctaaagtaagttaccaaggacttatatgcattttttcgtat

SEQ ID NO: 64758 - DNA, 863 bp, Bovine  19866881172381
  misc_feature (1)..(1): n is a, c, g, or t
ntttgcaattcaagccaggaaccttgttctccaccctggttttcatcctataatactatactaccttcttctgtggtttccgggggaaaacttgaaaatatatttgagcttaaaaatataccatatgtaagactatgtagaacccaaaggcattaataagaatgcatacttatgctaaacgacattgcaaatgtaaatgtcatgtgtccatattttttctaaggataattcataaccaaacagtgggtacatgcttcagtggtgacgacagcagaacaattctttacaaccaattgccgcctttttagtaattaacatgctccatatagactgaaaggtcatttcttatcctctttctctagcagtctttaatatttaccaaatagtgttgcattgttggaaatgtcacaggctctacagcgcaggggtgattccacacagtgattcatgatgacttagttcattaagaaaattacaactcatttatttggtcactatatctcttctgctctcaaagaattctctgtgattaaaaaagtgaattatgttgacttgtttctgtattgtaggtggctttaattaaaataaaaagataatgtgtcttagtcttaagtatttccttttcaatgaccattagaagtttcagtagaggaattgtgatggcaaatgcaaagcaattcagggatgaattcactttccttttttccaaccactagaatctcattacatgacatctccctttaacctgtttgttgatttgggagaatggcattgaaacatgtataatatcacataagaaacagatcgccagtccaggttggatgcatgatacaggatgctcggggctgctgcactgggatgac

SEQ ID NO: 64759 - DNA, 782 bp, Bovine  19866881204939
  misc_feature (1)..(1): n is a, c, g, or t
ngatgctatgtttggggtacatcagacacagtttaggaattacaatctggtttctcaacagagaagagagaatcttcagtttacaattaccatattccagcaaaagatcactttcaatgttttctctttagtcccagcaagaagatttccttgccattcaaaaatgaagtcacatgtactgtctgtgttgagtctgagtcgtataactaacacttcaaaggggaattctaatggtttcactggggtgaagaccacatcccatcagtactgggtttatctgtctatgacgtgtggcgacaacaatgtaccccagaaaaagccgtgacttaacatgttgtcttgctcagaccgcatgtctggtgctggtcggtggagtttctgctccatgctgtcacctggggactctggggaactctatccttgtgtgataccacctctcaagcacttgcttctgtagcagaggaagagggctggaaagtggcgtgacggcccaggagcagcacaccccatttccattcacaccccaccggccagcactcacatcacagagttccagccaacctgcaacaaaggccagaaggataggggagcacatggattattcactgaacactaaacatctttggggagaatatcacgtaaatgtccaatctataccagacagtttatactgcttgatcttatcattaaaacaactctgcaatgtaaaaattccccattcactactggagaaacaggctcggaaatcttaaatgacatgcattaagttcactcaaccagaa

SEQ ID NO: 64760 - DNA, 1219 bp, Bovine  19866881277924
  misc_feature (1)..(1): n is a, c, g, or t
ncggattccctgaaactctcatctgaaggctcacacagcccccaaaggaagccctttcacttcatgtgccccttggctcttagcaggaagcgctgatgctggtttattctccccactagactgcggctccagctgaggctccaggaggctgagggcctcctgagccacactaggtggctgccctggccaccgagggtgtgtcatatcaagggtggcacagatgggctgacgggcatgcaggaacagtacagggacctggaagcaggggccggggtggtgagtgaggcaggaggggccgggaacggagctctcagttctctagaaagaggcaggggatgaaatgatcgtttgccttccctgatctcaggagcagctgcagttctcagatcccagcagccctgccttaccagtagccgctaaccatgctgtgaggcagccgagaacgctcctaaccttgcactcgtggggcgcaagtttgcaaggccagggctccaacacctggactgccgggtgatcccgcaggctacagaggaggcggcggcatcagggaggtggcgagacctccactcctatcagcggccgatggggggccaggcctgcggcccgaacacggggcgggcggcagggtcacggacagcagccgcttcggcggtcttgctgtgtatcagcaccaacgcgctctgcagctcatcggtctgtacgtgcagtttcttttttccacagctgtcaaatcacatcgattttcagtcatctgaacctgggtaggatcagcaaaccagtttccccaggtgaaaagctagtttatcaaaggagtcatttatccaatgctctgcgataagaaaggagttttgagtggcttttgggaaacgcacaacccattcccgaagggggttggtaacaatggtcataattaccatttatgaagcatctactacaacccttcacttcacatcccttttattcctctccaaccatcttttgagggagataatagctcaattgatgggtacctgcttctcctgcctcctctcattaaaccctaactacccgctgctgtgtgtattattatcccaattatttagcaaatgaaactgaagcacaaacaatcgcatgtcgcttgcgcctcgtctcataggcaatgacagagctgggcttctgactcagggcttggatgtcaccaacccacgctttcccacttgagcctctcagactggaggtt

SEQ ID NO: 64761 - DNA, 1974 bp, Bovine  19866881287901
  misc_feature (1)..(1): n is a, c, g, or t
natttcaagtttattctgcagtatagaaatccagacaaggaacagcaaactatggtccatgggctgaattcatccagctacttgcttctagaaataaaagttttactggaaatatagccatactcatttatgtattttctatgactgcttttgcattacaagagcagaggtgagtagttataacagactgtacagcctgcaaaacctaaaaagatttactatctggacctttacagaaaaaatttccagttcctgtatagtaagtgagcaaaaatatttctagtgtttacttaacagtctctttatgaaaatgatcatagtttgtattttgctgtcaataagaccaaacagattttaagaacaagctgatggggaaaaagccaagagcataaaggttattcttgctccccaaagattaatttctatgctaaacactaaagcttataggattgtgtttataataaattctttcttaagataaatgatgtaggttgaagccagaaaatgatgatgtcattatttcagattagcaagatgttcatgcccaatgatatcctccaagtaataatgtacctagacaggaataaaaatacttcaagtattatttcagataaaactacagaagttgaatataaaaagttggcctctgatcaatctcagagattaaagggctccaaagtacacagaaattttttcaggaagatgctgaaacacaaatctgttaagtgtgaataaaaatataacctatgattttcataatttaatgcttaaaccctagttgtaaggttacatacaaggtatggaatatgtgttgataataaaaagagaaaaattggtataaatagagcttagttaattccattagttttcaacaataacatctaaaactatctatggggttattgtcacgtcaattatcatttttataatcttgcaaaggaaaagctgaaacacaaggtaaactgaggagagaaaaaaaattatttacccttggttttgctagatctttaacgacttcaatttctgcatcagaaataatatcatggaagcggataatacgaggcttgtcccactcatcctcctgtttggctggagccaggataaatttaggattccggtttccatcatggtagcgacagaagagttttttctgtctccgaggagtctgaacaaaaagtttaaaaaattataaatatattagagtaataatattttaatgctgttcctatgaagataagaagcagtaatcatgctggtgtatagacacagtacttgaggaagaacatacaaaacaaatagtgctctgcaaatattctgcatcaaacaggaccttcagaattcaaacaggaccttcagaattttaaaagttttattaatgattcttttctggaagagatggtgaggtttctctttaacccttctctcatcaaaataaagttcaggccttgtaaatatgaaaaaaataataaaatgattatagaaatatgaaatgaatgaccagccctgcgccaaacttcacaaagtaactgggaaaaacccagaaaagtttcttaaagaaaaaaacctaaccaggttttcccaagtacctcctaattttaaaaagtttaagtgatttttttttacgatgaaaagagagctctgaaagagaaaattagttattaaacaaagaagccaggtgcttttagtagcaggtattaaagtcagcaaaaatcaataaatgtacttttcaatcacctatgtatcacattaactaaatatggggttggccaaaaagataaaaacaaccccgcatggatgttttggccaatccaatgttatgccattgctgattcttctcttgattaaacaagcatttcatattataaagtagaactaatagtgatttatgtttattcttggtatttaccaagaatcaaatccaaggttttaaatatatcttttatatgatgataagaccaatttaactattctgag

SEQ ID NO: 64762 - DNA, 1321 bp, Bovine  19866881399141
  misc_feature (1)..(1): n is a, c, g, or t
nggaagaaaactggtacttgagctcctgggttttcaagtaatcctggtttcccttcctcatgtgactattctgcctagaagcggttgcaggattagggtaccagcaagttacaggccacctgtcaggcagctgtcaagtggtaatgattttcaatcactgccaagcaggttctgggcttgagccagtgacctaggaaagaagtctccatagcccattaccaaactatccctcggggcctttgcttcccgactaacaccctttccgatagaactccatttctgtcattgaatctgtcaacatgcccacaaatccctgaagggtgaaatgaatttgaaccacagtgttgggcaaacgagctcaaaagtgagttcttcagaaagaggagccaatattccagacatcaatccattggaaacaatggctttggttgctccccctgcagcttgtgtgggggtaggagtcggggaggagataaaccaaaaagttgttatatagtttactgcatggcaaaccttaacttccagattctaatctttcatgttttcaagtagatgaagcctgcatgctggtggctgaaactcttatcgagatgaaaaactgaatccctctggagcatccttcttccctctgaccaggttacctgcgagttccagggtgattgcattaggaaaacacagtttcgtagcatttcaaaccctatctatctatgtatttaatatttttttaaaaaagttttccttctgttaaccgtgagcccacagtgagtagcagaagcttcctgtggtaggaaacagcttatctcaaactttcttatcccaccaacatctacacagctcagacttggttggaagcccactatgttttttttttttaaactttgatagtgtttgttgtgaaccagcccagaaaataagtatattttatgtgaagctacactgagcctatcctgttaacttgaaggaagggagtgaggtagggagtgaaggaaacccattccccttgccaggagtcaaagatagggtgtcagagcccctttgacctgccccatgtccagtgtgaactttctgaggccttatatgcacataaaatggacgttgtagttatctaggactacaagatatccacattttcttatacaacacatgccagccttgtctagaggtgagagggaacaggtaagggtttggcttcagtaaagcgaccacattccaagtcagcattgacagttcagtgtccaaccatgtgactccagactttggctccaatttgaaagcacttaatttttccctgctcaacaaatctaatacatgaggcttgcct

SEQ ID NO: 64763 - DNA, 1461 bp, Bovine  19866880503489
  misc_feature (1)..(1): n is a, c, g, or t
nattacttttacaaatgacacctaccaactgcccatgtttggcacaaaaggttaactgaacattaagtgaaattattcactagcaaacaaaaatttcaggaagaaggagctgaaatgagctgaacatgatctttgaaaatatgactactacatcatggtacaaattgttggggaaacagaattaaaaataaaatcttctcccaatccaaaaatctctccagaaagacagtagaaaaagaaacattttttaaattattattattccataagcattaaatcgctctcagaggctacaagaacagagaggaatcttaactttttacataccctagccgatacaagtcatcctttacatgttcaaaaaaaatagtaattagtcctcaagtaagaggacttgccagcaccgtttgtcacatgtagttcattctaacttaacctggtaattatgtgggcagctacataacaacatacatacatacatacatagcattggcttgttggctttcccaagaagaaaagctaaattcttattttttttatgataggaggtagtttggcaactcagaaccaagcacccacctaaataagtctaccactgtcccccagaaactgggagagaggggtgctaccttccttgatgttcatattcaaagaggccactcccagtctcttgagagaaacattctcaggttacaaagctgaccaaatgccaatccagtcttcaaaagaattcgaagcacttcccaattatagcttttctaaagtaaatgtcaaagaaggaaagagaaggaaatctctcattttctacagggagaatcaagcctctcatttctcattttcacttgtccttacatgatgcacatgttttgattttattctaggtgtgcaagacaataaaataagtgaaagttcattcagcaaatatatctaagagtgcctactatgcaccaggcacgtgctagtaggtccgaaaccctatgtctttattctaaaataaagaagctctgtgctcaacatcactatttattagggaaatgcaaatcaaaactacaataatgtagaggtaggtgtgtgggggggaggctcaagagggaagggatatgtatatcattatgactgatttgtgttgttgtatggcagaaaccagcacaacattgtaaagcaattatctaccaattaaaaaataaatgaaaaaaaagaaaaagaaaactacaatgaggtatcatctcaaatcagtcagaatggccatcatcaaaaaatatacaaaaaaaaaaaaatggtggagaaggtgtggagaaaagggaacccttcaacaatgttggaagaagtgtaaactggtacggccactgtggagaatagtatgcaggttccttaaaaaactaaaaatagagtaatcatatgacccagcaatcccactcctattcaaatatcggagaagagcataattcaaaacgatgcaca

SEQ ID NO: 64764 - DNA, 3233 bp, Bovine  19866881202665
  misc_feature (1)..(1): n is a, c, g, or t
nctattacactgaaaaattatggagctgtgcaaaccactgaggctaggaaataaaggagcaaaattatcaagtataaatatatatatatatatatatatatatatgtgcacattatatctttcgccgagtttctggcacacagaattgatcaaaggcaagcagactaggttgttgaatgtattttgctatttaacaaagtaccagcccgaccttcaaagcctgctgttgtttgatatgtgaagcaacccgaggactgccacggctgcaagaagaaaactctccccaatgcccatttaagaggtggccatggagtacaacatagaaggaaaaactcccaggagcaaacgccccaaactgttgaagagaatggtctccaaaggaacgagcaagtactaaatgtgctgaggaccaggactcgcctgcgggccaggaccgggggtggtcagtgtccttgcccagaagatgtaactgtgctgaagagcaactgccgttgttccccattccacaccttctgcaaggaaatgtttttattatggatgttctctgcccgcttcattctccatcattctacattgggcgtagtagggattaagactgaagcaaactccttttgttctagttttgaggtagctgagcgatgaaaggacacactaagaacagaaaatacctcacaaacccaaacattttaaaccttggaccaaagggagcgactcgatgggactctgactcctttgggcaggagctagtgattgcattcccgaagaagcttgtggaagctggttctagttctccatccatgtctctcctccttccgtcctcccactctctacctttagtgacaggacctctcaccttaaacggggtgtgggtgcagcatggtctcccatcaagacattcccaggccgctgctcagacaggtcgagccgtggaggttctgaccaagaatacataaatagaagtcgtgagttgactttcagttgatgccttcaataaaaaggctatgtcttcctttgtccttttatcttctttttacagctagaatatgcttgtgatagtgagagctgaggagcatgaccatatcagacctggatgacttgtgtgacaagagacagaaatgaatctatcgttttaaaccacttttatctgggctcttgatttggctgcttagctagtatcctaaggaaaaagaatagatttgcatgcactcctgagtttgcacttatactaacacatgattcaccttcttacctttaactaagggaatatcagttgcaaatagaatttagttctctaggtttcccagacccaatactagcaggcgtctgcttccttccagcttttttgaacctaggaacataaagaaggtgtgcatcaattactttaggctaccagggatagatttccaacttatcataataaactactaccaaaataagtttcataatgatgaactaatgtttctaagagctttctttacattttctttttcaatcccaatatcttataaggtatatgctattattattcctgttttacagatgaggaaactgaagcagaaaggtaagtcacagctgggattagaatccaagaaacctatttctgttttgcaaaggaattcatttgtgtgggggatggtgaattaggggattgggacggacataaacacactactctgtttaaaatgacaaccagcaaggccctcctgtacagcacacggaactctgctcaatactctgtgatgacctgtatgggaaaagaatctgaaagagtgagcacaggtgtgtgtataactgaattgctctgctgttcacctgaagccaacacaacgtgtttattggtgagatggaaggggtgggtatgtttctgtttgtggttgtgttagggtcattttgcttggcttctgctccaaagaggtgatgaacagcgtcagaagacctcaataaaagaatagttttcagtttcgttcttccattcctcagaaagtaagtcacccctctaagatgatttttgtcttagcgttcagatctccagcctcctggaagggttgactcccgttaagtggcattacagaccatttccaatgcagagggccagcttaacctactcaggaaaaagtaaaaacatgtgttaaattgaatcagccagtgggccttaaagtgatgatctgatttagagtcaaagagattttcggcaaaggagacaaagaatcatgaaagaagttaagcaaaataaatggaatttgctttagcctgggagaagaaacatgattattattccaaaaaggttgtaaagaggagctgaaaaaaatcccaagtaaagttgggaataagagtacacattaaaatcaaatgtctttcaatgtagaaatgcactgaaatgtcaaatgtacattaattatctaggatccactttgatgatgtcctcttgttaattcatttgtcagatagcaaaagttagcagccccagaaggaagccatcaaatgtgtaatagacagggagatttggcaggcaggcagggaaaatttagccaagccaacactaaaccacttacggaaatgtaaaacttaagaatgtccagagtaagtcccggaactcaagacctggcagatataggctccaaggacagaagtatatttttcacttacgtttgcatgaatatgactctttggaaactgacctaatttaaagcaggtttgtatgctggacagttttctcttcctcgcataaaacatttcatttagtaataggaaatgctctctctggttctggcttgcaggatgcatcacaaataatcctacaaatgcttttttccttttcattaaacacattattttagctacgaagacccttatctaaacaaaatgcacctgccaacaatgacttaatttcccaagttgctggagaaagttgatagagacttgcaaacttcaggggatgaaatttagacaattcgaggtcagatttggttacatgacaccttacttcctattccctggtccttagacaaacagagatacatccgggtataatgctgacctgtagaatggccacggcacaacctcccgcttcataggagaccaggacggctgtgttctggaaggctctgatttgactgtttgtagttcagagaagtgactcttaggaagatgtcctgaatataccttgtcccacagatgccagttgtttagattgggacttgaggagatgtgttatttctgcagctaagtaagca

SEQ ID NO: 64765 - DNA, 1487 bp, Bovine  19866880515670
  misc_feature (1)..(1): n is a, c, g, or t
naattattaactggagctgtaagctaactcttttttcagagaggtagtgggggacagccccccccgtaaagtcagaggtgtaggtgaaagcacaaagcagaaagtaggcagactctggttttgggggtatatgctcgagaatttccagggggactcctgaagctcgatcccgactttgcgtatgccgagcctccttcctcatgacctttgtcatgggcggagttcctcacgctggctaccggcagtgatagaattccagttgagctattccagatcctgaaagatgatgctgtggaaagtgctgcactcaatatgcaatatgcactcaatatgcaatatgccggctcccggcaagttttcatttctcttgggtatatacctaggagtggaattgctggattgtatgataactctgtagttaaccccccatagtttttaatgtattttaattaaaattcaccttgggcctcaggatggccaaaaaatctttaccataaaatctgtgcttgtgaattctggttttaactgtatagaactatttccctaaatatcactaaatttgtgtaatatacttccttatgtatttgtttaggttgagttctaagtattccgctttttgttatgcagatattctttttacgggaggtgagggatgtatttggctttaatttcccttctctgaaacctcctttagtatgctttgtctaactttcttagaaaagcgctaaatgaaactatgcttcaaagaaacttagaacttaaaactgagaatcaggagacttgagattgagccgtttattagctcagtatcgttgtgcagttcagttgagaatccttgtgaattatcagtttcctaacacagaaaaggaacataaccattcctacctcacagggttattgtagaaagtaagtgctgtggatgtgaaggtgttttgtaagcaccaaagtgttctgtgaatgcaaagcatctcggtgtccagtctctttcatcatatacttcattaatttttaaagttaaaactttcatatgaagcaatttcatgaggatggaaacctgcttcagaatctattaacagctcaaaattccaggctcactttaataataattcatattctcttttgtttatttagcattaccaactcaaaagataaaaacaagtatagttccaaatcaaatagaaagtgcacttcaaatcgttctttacacacacacacacacacatatataataagagatttacacggctgtttttgcttttcactcacacacaaaaaccccgagtgtgttataacagtggccatggtttgttttccatgctgacagatgaataatttatttatttgtgttaaagtgggagtatctatggttataatgataggagccaagaagatttaaatgctgaatatatttgctgaatatacaactagcagttttcagtttatataacaaattaggaaactggcagaacaaaggaaaatccaaacat

SEQ ID NO: 64766 - DNA, 1896 bp, Bovine  19866881311898
  misc_feature (1)..(1): n is a, c, g, or t
nggaagcacacccaatttttaccttctttttattttagtattcccttctcccttcccccaatattgtgttttcagagtacagaaaatgctgcagttgcttttcattgtaattcattttaataatgaaaatgcccaatttctaaaattgcaatttaagccttttgggaacacaaacaatcttccccctgtgcttgggaaagttgaaaaatatgattaacccacagcctgtgcgtgcgtgcacagtcagttcagtgacttcagtgtctgactctttgcaaccccatggactgtagcccgccaggctcctctgtccatggaattttccaggcaagaatactggagtgggttgctgtgccctcctccaggggatctttccaaaccagggatcaaacccgcgtctcttacatctcctgcattggcaggtgggttctagcaccacctgcaaagcgccacctacatcctaacctctgagtagtgaccctttaaagcatcattccgttggatcctgtttccctccgtctctgtggctgtggtttttcctctccagatgctctctgtctcttttgagttgtgggatcctacctgcccccatcagtctctaaagaggtggcccaatgttgaatcaggaagatagcctgtcttacacaatcacaaagcaaatttacaagattcaaatcccttaagtgttcttcgaggtggtccacttttaaaggccaatttttcagatagtttgggaggccaaattcctcctcctttgaagctagacagaatgattttactgcaaggtcgcccaaccaatactgtttatacagagtgactctttgacttattattctactccccacgggtgtgaggattaggatttatcactagacgcatatggcagatattagactgtttggaacccgtgtatctagaagtcacattgagtccagggttgtttggtccttggtaacctggaaacctaattgcaacaacaagccatccaaacagagttattcttctgagtgctcataatgaaagcaataccaggagggatcagtcaggaatggactccacatccctggcaaacaaaactgacttctagcttatggttatcgctaattggggtacagtaattctgaggcatgtttagtggaacttaaaaaaaaaaaaaattccacagttcctggtaatgtgttcactgaagacttcctggatgaagtatcattctttttcatttacgggttaaaatagcctgggtgttttcctccatatccaagcaagtgtaagagttctgctttcttaaataaacgtagtttattttcttcagtatttcatactatctaagcactacagcaaaatggaaaggagcacagtatggtgacttgaatgccccctgcccattttattcattcatgtcttcattttggcactatagatacaaacacaggtggaatagaagctaatacagggaagacagtgttccgtgtggaaaggattttgtgtcatctcttggatttcttgagttgtgttgaacgtaattaaggcacaaagtaagtgaggcctcttataaaacctagattaatcatggaagtagattggtttcaatttgggggtgatagaaggcatccctcaccaattttccattccttttggaacattaggtggctaatattgttgcttatttgtctccactgttttttttagttccaagctatcaccattctccttcaccttttctttgtagtttggggattgcagggtatatatgagctgaaatgaagtaaaaatgcagtggtagtgttttcaagctcgtctttcagcaaacttgagttgatcagagatgtccctgaacttctttttcttgttaatataacagttgatgctcaggaaaacagacaaacaaactcgata

SEQ ID NO: 64767 - DNA, 1731 bp, Bovine  19866881571234
  misc_feature (1)..(1): n is a, c, g, or t
ngggactttcatcggtaaggtcacagttttcagtggggatatggcatcttcacatagaaaagaaaaaaggaaaaaaaaaaaaaacaaaaaaacaaaagcatgctaacttacttttaaatagaaacagatagtaggggtttatacctctgctattaagatgcacagcttgaataaaacataaaatgcctcaaatactgtttgtgactaaacagaatatgacatctatggctgttttcagggcacattagtcaatctgcccacgtgggtgaatttacccgggtagcaaatgtgtaagagcaatgaacaagaagagatggaaatctaatgaatactacattgggcaaagagtcttatttccatgtgaatctgaataacctaagtttttcttttcctaaaatagtcaggttttaataaattttttttaatttcatttttttagcactgaaaacattttgtatttaggtatagccaattaacaatgttgtgataatttcagctgaacagcgaagggactcagtcatacatatacatgtatccattctcccctcaacccctctcccatccagactggcacataacattgttgattatccattttaaatatagcagtgtgtacataacctttccaaagtccctaactatcctaaaagagttacttctcaatcttgggtaggacaatatcatccccacaatgtcattaacctgaacctatgtactcacggcagccatcgtcctaaggaatccttgttcaatacccaggctatgccagttgacatcagccaccatgtgagacgtaattccaaacaagaaagctaccaatttctctgtgtcctgccaaataagcaaattagagttggggttagggggaaggtagtaattttataacaaccttattaaaaggattaacaaatatgaattcatttccattactgagacttaacaaaacatcagagacaggtatgttgtagttaccagcgaaccacaaaggacttttttttgaaatgtttctgagtgccttgaaactgctttcagatttatttactagggaagcaaaatgaccacgtgacatgccccaaattttaaaaacattgtttattgaaaataaaactgaagatgtaaattttgaaaaatcatttgttcaactgttgactagctatttactatgtcccatatgctgtgtttggtattaaggcagaagggtgagtagccctcagagcctggattaagggttggggttagaaatggagttactccgggtgcaacaatagtacttggcaagtctggaacggagtatttttagggttacaggctgtgcctacctcatcccagggaagaggatagttcttccggatataatgaacacttgcgttaagaaatggagtccagtgagtgctctctgacacgtcatggaattgtcctgacaaaacagaggcaaccgtcagagctccttcttaaaaggttggaggttctcttgtatatacacaccacatctttgttcatccattcatctgtcagtgggcacttaggttatttccatgtctttgctaatgttaatagtgcttcaacaaacactggggtacttgtgtctatttaaacaatagaatattactcagtcataaaaaggaatgaaaatgggtcattagtagagatgtggacgaacctaaagactatcacacaaagtaagtcagagaaaaatgttgtatattaatacataaacatgcaatctagaaa

SEQ ID NO: 64768 - DNA, 1254 bp, Bovine  19866881925465
  misc_feature (1)..(1): n is a, c, g, or t
ntcctagactatgagagcttatgattaactgcatagtatgtgtttgatgaattgagctgaactgaattaaaaggaaacccaggttagaacagttgttgctgtaatcaagcaattcagagttgaggaaactgaggcccataaagcaacccagccaggacttcgaaactaactcctgagatctttctactttacataataagcattttattttcatttctactgacactttctctgtgaaccctacacttacttaaaactaatctcttctagtatcttcagcatctttagtaactgacagcatgtgatttatgtgaatttcagatatatcattagttttcattgcagtgacccatttttaatcaatctcttaacactataaatttataatgaagatatggggtgttactagcaaacaaaatgaatattctgttaacaacaaggaaacacagcctagtgaatgtgctaatatgtcttcccacttgcatttatttgtctctgcttaatatatatttagcttgatttatactttaatgccccacatttgttattctccaacagatggctaagatggcaaatgcaaagaaatgaggtccagatgaatatccttcccttttcaaggaagaaaatatagactaccttctgagtgtagtataaattccctgacagtgaacaagaatagtttgcatgtcagaagatgtctaacaaatagtatttgttcaagaagcaaagaggaatactttcttcaagagcatacatcccctctacatctacagaaacttgagaagcttgcctgctcagtcacagagtaattctaagtcccctgcctattggcactgagttgttgacaactgtggattttgcagtggattcccctgtggagattcacctttacagttattagatctcaaggtaataaagagtttggattcctgtaaagcacactacaagggacattaaactagctgtgctttggatatctgaatatgcgatgcttgtgaattcaactcattgagtccataacttgagtatctgaatgatctttgggcagagtggtaatttgtatagctagaataacccaagaattgaggatcactgctttgcggacttattatagtcaaaagcacatttttgtcaagttcgaggcccatggcttaccatacccaagaggtcattgctcaaactattggccaatgcagctatgaaattttatgcatctatgtacttgccctggtggctcagatggtaaagtgtctg

SEQ ID NO: 64769 - DNA, 1244 bp, Bovine  19866882044441
  misc_feature (1)..(1): n is a, c, g, or t
natgctatttgtcacagcttaaatctccttccctcccctcccctccaagtgaactccgtgagggcaggaatgtttcttttgtggaactgctgtatcccagaacctcccacagtgcggagcataacaggtgctcagaaaatgtctgatggatgaatcagtgttagattcccttggtacttggacctcattgctggactgtcttcttcagacgaagaatgctgaagggcagggtagaaaatgacctctgggctgactacctgtcataaactaaatgaaggagaaaggaaatctccctgcctcaacatccccccacagtctctccccctctgacacccccccacccccaattctctacttctgcctatgtcagttaatggatatatctccctattcaggccccaaacctggagggtggttctgggcttgtctcttcccttgcccaaagcccccgattttttcccccagttctcttcactccccagttcatgacttggcccgagcactcactaccagcctccgtgtaaaccaccctgttagcctcctgcgtggtcttcctgcagccaggcaggtacttcagatgctctgaaatcatacgtgctctcacctttcccgaaaccaaccaccctcccccagcggtctgttcgcttgtaattgcaggttcgtgttctgctcccctgacagtgaaagtgaagtagctcagtcgtgtccgactctttgcaacccccgcggactgctgcctaccaagctcctccgtccatgggattctcccggcaaggatactggagtgggttgccatttccttctccaggggatcttcccgacccagggatcgaacctggggctcccgcattgcaggcagacgctttaacgtctgagccaccagggaagcctttcctcctctacccgaccttttatgaggctcgagagccgggccatgctccctaacgcccgcaccaaacttctttgttgtctttccacaaggtgtatcctagagcactggggaggggagaggtgacacagctggtttcactagggtacaaagcccctatcgcccctggatcctgcgcgcactcaccttggccgagacccccctccagctgcagaaagcctcgtaggcagcgcgcacggcggcgcgggcctcgggcaccccgcagtcggccaccaagcccagctcggcgccgctggccgggtcgtgcaccgggaaggtggcggctgccgagacccagaggccgcccacgaagccg

SEQ ID NO: 64770 - DNA, 1756 bp, Bovine  19866880245571
  misc_feature (1)..(1): n is a, c, g, or t
ntttccccatctatttcccatgaagtgctgggaccggatgcatgatcttagttttctgaatgttgagctttaagccaactttttcactctcctctttcactttcatcaagaggctctttagttcctcttcactttctgccataagggtggtgtcatctgcatatctgaggctattgatatttctcccagcaatcttgattccagcttgtgcttcttccagcccagcgtttctcatgatgtactgtgcacataagttaaataagcagggtgacaatatatagccttgatgtactccttttcctatttggaaccagtctgttgttccacgtccagttctaactcttgcttcttgacctgcatacaggtttgtaggcttatttatttccttccaaagaggaaggcacaataatgataagacagcaataattaccacacgcagaaaattgcagttttataacaagtagaagcacagagataagtataaaaggcaaaatgcaatatatcaaagataactgattagaattaatattaattaatgttaaaaacatcactctaagctcatcattctgttagagtttgaggaaacccagtggttgttatctctgtttacttcacttaagttcaaaatctgttaagaaaacagtggttttggcagataaaaatcaaagtggaatctttattatcaataaaaatggcactgaagaatgcaaattaaatgtactcagcaaagtcttaacactgaacttaagtgttacacatgcccatccactcagttggagggagctctgtgctaccacatgtttgttttcctccagggcaatcgaacaaacttcgtagtcacattcagaagctcttcaatgtacctattataattttgttttgttttcctacgcctttctaaattacattacagtcaatatcccttctttctttctttttgacaaaacacttcaaaatttccttatggtatgctgtgtgcatgtgcttgcgcaacatatttgggtatgtgtatgtgtgtgtgtgtagcaaattccgtcttatcagcaacaaaatatttttttaaattgtggttagatttgataggcaatggaaaatattgagggttttttttgacaagtatcaaatattataaaattatatgctaaaattttgaaattgatcatgttttagaacgtcccgttttcctacagctaatgtagttcataaaatgaagacattaagagaaagcatttataaaagttaaagcaagtgactcatacacagccaactctcaagtagatgacagttccctttctccttttcatttccttactctggacccttggaggaaaaggatgcaattctgaattactagtcaaatttaacaatcaagtagagttggtagcttctgaaattattgtcattgatttctttgggcatcatttaaaaatagaattgtgaggtgttataagaagaaatagacctgttataatttgggaacaggacaaggaaaacagttttccaaaatttccttgtgcccttcagaattctccagtcagtatatttgttcttgatgttatcactacactttcattttcacttttcaattttatggtggatttgaaagaaagtctgtagcttaaggtttataaatatttaagctcttgctagatagagttgagatctgaagccaagtggaaagaagaaaacgtactcgggggcaaaacaaacaaaacaaaccaaacacgaaacattaggaagcctcaaacagtgcctg

SEQ ID NO: 64771 - DNA, 1269 bp, Bovine  19866880506154
  misc_feature (1)..(1): n is a, c, g, or t
ncttgactgcttttgtaactttctgatcatttaatttgtagagatggtttaatctgaatgttgccaaggcaaacgagataggctcttctctcaccaccgccactggttttgcaaaaaaaggaactattcaaacttacagtataaaatgatttttttgttgttgttgttaaagagaattatgataaaggaaatgtgtgactatttaacaaaagatggattttgaagtatttattatttccttcaaaaaatgtatttcattccccagttcaggacacttcctgtatactagatataaacctgtgaacatataaatgcaatatggggtgaaaaaatacagaatgaaaagatctcttctagataaagggatcaagataatcatttttattttttaagtatatttaactggctctggaatcctaagtaggattagagtaggaaaaaaattaggggttgagacacaaagatattccaagaggtggaaacagtagtttcagagaaataggatgggttggggtaaaacttcacttcagtttggccttaaccttcagttcttgaggaggaagcatgggacagtggacctggagagatagattaatatcatattagtattatcagttaaatgtaagtaataacttgtcttgttttggaaaggattgcaggttctttatgaaggtacagaagccttttttttggcagacttgaaacagggctatttctcacattcctatcggtaattgcctaatggtgtgtagagatgaaattgaaaacctggaggcttgccttctcagggaagagtgtgccttgacacttcttactgaactgttggtttcagaagaaacaaattatttaagctaatatttctttctccattatttttgtaatacagtctctgaatctacagatttaataattgtttgcctgtttctggctgaaatttcatctctatgcagcagtttcttatctgctgaggaaagaaatactgtttttctataaacgaaaatgagggtgatttatggatgtgatgacttaataaaatgtgctggactcccatttctgcccatgaagaaatatctggcatggaatatgccctcccactttaaactactagaaacctgtaccaaacgaactattttcagactttggaacaataggcttcccaggattgtgaccatggagagaagggaaacaagtgacttaaggcctaagatcacctgggcttcctgtcagtacttggcacagggaatggggggatccaagcagcatatggtg

SEQ ID NO: 64772 - DNA, 2215 bp, Bovine  19866880509320
  misc_feature (1)..(1): n is a, c, g, or t
nacttcagagacatagggtaacagaatgcccagtgatcacatcccccaaatttaatctttgttatttccagtctgatttctaaagacagtactacctgaccaagagtatagattaaatgatcaatgttactttatatgcaagacttaagtttgcaatactagctaaaattagggtaataaaattcccccatgaaaagaaggactggccatgttggtccatttagaggtggctggaggagaagggggccgacagaagataagatggctggatggcatcactgactcaatggacatgagtctgagtgaactccaggagttggtgatggacagggaggcccggcgtgctgcgattcatggggtcacaaagagtctgacatgactgagtgactgaactgaactgaactgaactggactctatgctatactacactttccttttctccaccagtctaatacagtcttgccagtctcatgagggtgtgatttcctagcttacccaatataggcccaggtctctcatctctgaagtctgagactcctagagtcaactgtcattaactgagaattatagatcaatgaaccagtgtcacctttcaaatcaaacatgattttgttcattgtggtgtctggtaaaaatgttggagggaaagagagaaggaagaagaaacaaaaaagtagtagaatgggagagaaggaggggaatatacttatatgaattggtagaatcaattattgtaaaacagactttttgtaaatattgtgctataatatatctgacaaagaatttaatttgctctttaagggggtgtgctatcctataagttggagaaggaaatggcaacccacaacagtgttcttgagaacactcaagagaatcctggggatggcggagcctggtgggctgccatctctggggtcgcatagagtcagacacgactgaaaatgacttagcagcagcagcagcagcaggagctatcctataaagagtttaagattaatattatgatatctcctgttcctacctatgagaccttgaacaactcaatgtctcctaacaccaatattctcatgaatatgataaatgttaagcatattcatttcaaacattgttgaagggatcaaaggaactcatctatataagatcaagtgcacatcatagacacttttctttccatttctccatcatactgagcatcaagaacttcctatttaacatacataaattgtccacttataagtttatatgcaagacaatttgaatctcaagtctctgaagcccaattataggaggatgagaggagagtatattggcttgaaatgtaatttaagcttttaaactacattataaatggtaaaacagcagcaaaaatacacccactctgaccacagatatctaatcatccttaaagttaacaaggtttacctgggaagtttatctggttcaataaaggcaatgttgctctgactaaatgtaagaaattacattcattagtaagtaacctgtgaaaagaaaaacaatttaagtttccatttctgattgctgcaactatgctaatctttcaggcctccaactccatctgctttagaatgtagttctgtttgctgcctgtttatttcccagtgaatgaaggggaaggggatgacaggggatgagatggttggtggcatcaccgactcgatggacatgagtttgagcaagctccgtgagttggcgatggacagggaagcctggtatgctgcagtccgtggggtcacagagtcggacatgactgagtgactgaactgactgactgaaggagaaggacgttctttccaatatatgatttctcaggtagtgctaagatcaaacatactaattcctactgcagacttccatagcttcttgttagagttccctgccaattcggggtagtcatcatttcttacctagtggtgagtggtattaaggaatattctctctatattcaccacataggaatgcttttttaaaaaataaaagtgcaaggaaattccctgatggtccaatgggaggacttggcaatctcactgctagaacctgggttcaatctctggttggggaactaaaattccacaatccttaaataagcaaataaataaaagcacaaaatttatatttagaaaggaggaggattctttagctaaatctcactgggaataactctacagtctgttagttcttgggaaatttaaagaa

SEQ ID NO: 64773 - DNA, 1390 bp, Bovine  19866880552958
  misc_feature (1)..(1): n is a, c, g, or t
naaacatgtacttttcactaatatgcatttgttacaaagtaaatgaaaattgcatatgaaagggatttgaaagccataaaatactaccaaaagaaagctgtggatatttggaatgctcttctcaataaaagtgaatacctgggaagacatatgaaaaggttattgaataagaaagaaaagaaaaggaattgaaaaaaaaaaatttaaaagcaatcacaactatatcagtggaagccatatgaaaacaagattttttcaaaattggcttatttctagcaaggtggtaagttcctatatggtagtgtttatttgttaaaacaagcaaaatgtgggaaagttttagtcttcaaacactgagccatttacttgtgatatatatatatatacatatatatatacatatatatatatacatatatatatacatatatataatacatatcaatatatatgtatttttggcaaataaggccaagaaagaaattgaagaatttctttggactttatattgctagttaaactcgttaaattagttatatgtcataagggcatgccagtgagattttttggagcttgcatgagcatttgctaccatccacaaatttcctaaattaaatttttctataatatagtactgaacaccaacaacacagcatagaacttagagatctttattatgctttggttgtgagttgggttggattctgctattgatttttaagtaaaaatcttaactttacccataaagacatcttgtttcattttcattaaaaggtaggctgaactttttttcaagtccatcttctggaggctctataattttctttgaagttttctaaacttctttccattttgaagtccatggacctggaacatatgtctagaatgtgtgcatgctggtagtattttaaagattatttccttaaaccatgtccaccaaaaaattcttgataattttgctgcaggaagcaatagtcagtaatcttctttgagcattatctatcagatacaatttctctaattacactgcatcagcttttctaaaagttctgaaaacgtttccataaactaaaggtgttacacaaaaagatgtttttctgatcaaataaatttaggaaatgctaagttgaacaaggttaaacaggtttctttcctgcaggagtcccatgaatactttaataagataacatctgtcataaatctctaggagagaatactgattgatgatgtgttttccaaagttgcttcgtcaagtagcttacaacattatttagaccttttatgaaactctagtttggaaatgttaattctatgatttgcttgagtggggccttgaaccactgaatgggcctaatagcaagaaatttcattttttttcagggcttatcta

SEQ ID NO: 64774 - DNA, 1561 bp, Bovine  19866880636952
  misc_feature (1)..(1): n is a, c, g, or t
nagcacgcatgcagaaacattcatgcaaacaaaatatttagtggatacttacttactgcatttgaagtattttgaagtttctgagcattgccattatcatagtatgtaaaatacagaaaatatcttccatggcagatataatggatttgaagatttggaacatcactgcaataaaaaaatgaatagacatttggtgatcttctgttgaaatttaaattcatgtaaaccaggcctttgttacctgttggttagttcagggcgtaataattattagatttgttaaaaagaaatacaaacttcatctcataaacgaattggcagactttcttgcattttaattgctagaattatatcttcttcacttagaagttgtattttcttttattgaccaggctctgtgtgctgctgtggtgaaaccagatgttctggaaacaatggctttgctgttcagtggagcagatgtcatgtgtgcaacaggtgatcctgagcacagcaccccctatctgctggccaagaaggcagggcagagtctgcagatggaatttctctaccataacaagttctcaggttagtccctctcatgccttcatgaacctggtctctcctgatagatccttaaaaggactgcagcgcaaatctgtaaatttctcaaaacagaaacaccattcaaatgaaaagaaaatgtaattgtcagaaagacagaagatgcttattaagacccatgttttatttgctttcaaggaaaagtttaggaaatcaatcttttatttgtctttaatcatctaaatggaagattaaaatagttaatcccatgtaatcattttcactaaaattaaatccagttttcatgtatgaataataaacacaaccaaagtgcttatttgcaaattttatgcaaagcaaaataaatgtttctgtgtctttattctgcagtatatttgaagtagtttttcttctatctcagaactcatcaacatattcataagccaagggaaaattgtttacatttcagatttcagatgtggtatttctgtaatttttctagatttccctcaacatgacatatattctgaaggtcgattaaatcaagagtcctcccagtctacgttcctctgtgactttttgtatcaggctcctgctggtgcttctaaactctcttcagaaaaaaaactgcttgaaggtatcttttctgctccttttagattttgtcatctgataaaattttatttcattatcaaaacaattaggtttaagttttgatatttttccccttgagatgttagatttgatcttgcagtagagaaatatttattttttgaggatttataaatgtttccaggcacaggtattatttcatgcactgcagcaaaaatttactactggttcggaatgctgagcgaattctcagcagaattctctgacatctacctcggagacaaccaattctgcttcacgatttaagagttattccaaagaaatgtgaaattcagccccttcccttcgggacagaccccccagctggggagataatatagataaatgtcaacatgtaggaagaacg

SEQ ID NO: 64775 - DNA, 1694 bp, Bovine  19866880697890
  misc_feature (1)..(1): n is a, c, g, or t
natcccaggggatgggggagtctggtgggctcccgtctatggggtcgcacagagttggacacgactgaagcgacttagcagcagcagcagtggctcagtaatcaagaatctgcctaccaatgtaggagccccttgtttgatccctgggtcgggaagatcccctggagaaggaaatggcaacccactccagaattcttgcctgagaaatcccatggatggaggactctggcaggctacagtccatggggtcacaaagactcagacagaacttagtagctaaacaacaaaaacctgtaaacagtagctcgcctttagtgagcgtgtactgtgtgtaaggcattgctttaggctttttctatatgttcattgtaattctcataaaagctctgcaggatagttgatattatgctggtttcacatgaacagtggaggaactcagcatgaagcagagttttgcatttgatttgtgttataattgttactgtatgactttggctttggtcagtgtaatgaccaggtgacactagatggcagagcatctttattctttgagtttaggttttcttgtttttttttttcagcaaatttatttccatgtcttacttttctcaatgcaaccaataataaatgatgaattttagagattttctcatcttcccattgctccttatcagtatttaatatttaaatagttgaaagttgtgtgatcaagagggaagaagtaccagaacaatctgtgaaatgatgatagcaattattaaaataattgaataacagggcaattaatgtaattgttaagaagtgtacaagttttctagaatttttcttctaaattgcaggatatattaatctacccttctaaccacttatacaaagatgaaataggaaggaaatctgaaatatgaacttttcttcctaaagcttctcaatatatcataagtattctgcagactaaaaataagcttctagttattttttgacaattctggttataatatttataaacatcaattcattttactgttttcttgaaatatattgcttttcttaatcaccttgagaactgaattgatatttcaaatttgtaactaaatcaatttttccttttataaaagataaattaactatggattttgttgttgttgaaatttatttcaaaaaacagaaaccagtgcattctccatatttataatttcattagggatgttttctcattttgaagcattctgttttaagtgatatgtactttgactatggagcacacagaaatgatttcattggaaaacaatctaatagtctaacagcaaggtattctttgatagtcttcatttattccatccagtatatcagcaaggtctgtcattttaactcagaatagaccatgaatcagttggctgctctccatcttcactaacatcatctgaaccccagtcaccatcttgtcctgcctgggctgtaataccctctaccccagcccatatgtttactggttaatatcttccctggcttccctccaaaccattctcccaaacagacatagtgattgttgaaaatgcagatcagatcatgcatgtccattgttcaagtacatttagtggcttcccattacaggatataacccttttccttatctgacctaaaagaccttctggtgctttcccctcttcatcttacatccttccttcctatcctac

SEQ ID NO: 64776 - DNA, 1491 bp, Bovine  19866880810165
  misc_feature (1)..(1): n is a, c, g, or t
ngaggcaggtcaagtagtctggtattcccatctctttaagaattttccacagtttattgtgatccacacagtcaaaggctttgggtggtatatgaagctgacaatccttcccagatacataaccagtcatcagtttatcttactttactaattatgtgattccatggagaaggcgaaggcaccccactccagtactctttgcctggaaaatcccatggacagaggatcctggtaggctgcagtccatgggatcgccaagagttagacacgactgagtgacttcccttacatttttcattttcatgcattggagaaggaaatggcaacccactccagtgttcttgcctggagaatcccagggacaggggagcctgatgggctgccatctatggggtcacacagaatcagacacgactgaagtgacttagcagcagcagcagcagcatactacattatgtaacacagtcgctaccaaggcaaaatttcatatatttttgaaagatatttttttaattagagaagtgtgtttgacataaacaatatttaaatcaattgattcttgaaattctggtgttggagaaattttaacagagagcaacacttcattccttcttcccctctccttctttccctttctcttcccttccatctttgcatccgtttttcccccctctttccttcctttctattttctttaatgattttatattatggttaataataagcagattctagttctcagctgctaagatacacatctattaaagggacatacatgaggctcattgcctttcagtactttcaagttttgaatatcaatatgattaataaatccttagtttatagaaaaagcaattacatagtatccatgttatctcaatgtcacaatttatttaaaaaatcatattacaaataaggtattcataattcacaaatagatgctcctaactatacaatgagttatgaagaaataaaaaagaaaattgtgctactctatgccctgagattcatcatttatgcaggcatttaattctccagtaaaagttgtcaatgttataggctgaaatatcaatttcacattattccctcctaaagaaaattttcaattatgcaagatcttttcagtctataaaatacgttcccttgagtcttagttctctctggctctttccattcttttgtcccagcagatgacaggtaattattaaaatagataacttccataaagatcacaatatgctctttaattcacaatgcagttacaaattttcccctccatcttgaggtagtaaaacaggttcaaaccatctacttaggcatttatttactagttacttagtaaacataatcatatattgataatatgtgtgggtatatatacatatacatatatataaacctcacaccatacaaaacacctaagttcttaataaacagttgcaattttcactcaatatatgcatataaattaaaaatttattctttacccgg

SEQ ID NO: 64777 - DNA, 1853 bp, Bovine  19866880963432
  misc_feature (1)..(1): n is a, c, g, or t
nttccactaggtggcactgttgatttatctacttctgtagtttaccctcattttgtcttgaaagcggagtctgttttttcttttgtatttatttatttttacaatctaatgaaaattcctgcataggaaagagctgatttgggcaattctgaacttgaaaaatgggtgtttcttgccattagaaaccttataaataagctgctaccaaataagttagttcttttggcgtacaagcaagaaggttgatgacatatgtaactcccatctggattctgtaggtgtagaagcaaactgtctttatttcatctatatctcactatttggggattcttttaaataggaacaatgtcactggaatatcttcctccttacctgctttatttggtaatccgagacagtggcatgcccaagagagccaggttttcaatggctttgcagcctatgctgagagaagcaatttaccataggcctgaatgtccctgcacattctctttgggtattccaagaacgcaaaacgttggctctctgggccatttctcaaaagttgcgtttgcagggaacagccttgagggatgcagtcatgtctctctctagaaaacaataagcttgtttttatctactgtaaaagtgatgattcccccaagcttcgtgttcctccctgtaatcaagcaacatccatcatggctccttggtgctgcccccatggaacttggggcaagtcaggagttgatgcaaataaacatgaagctctagtctgggacctggactgtttactgctgtgcttgcacctgggcatacatctccccgagcaacaaaatacaaggagactgcatgggactaaaaataactgcacgcatgcacaattggggcacattctggacaaaagatacaaagagaccaaaaaaaacttccactgcgattttgaggagcctggagcaaaagcagcgagcataccccctgcatataacatcacctacggggcacaccagaccacctgacctgcctcctgagaaatctgtatgcaggtcaggaaacaacagttagaactggacatgaaacaacagactggtcccaaataggaaaaggagtacatcaaggctgtatattgtcatcctgaatatttaacttatatatatgcagagtacatcatgagaaatgctggcctggatgatgtacaagctggaatcaagattgccaggagaaatatcaataacttcagatacgcagatgagatcacacttacggtaggaagtgaagaaaaactaaagagcctcttgatgaaagtgaaaggggagagtgaaaaaggtggattaaagctcaacattcagaaaactaagttcatggcatccggtcctatcacttcatggcaaatagatggggaaacaggggaaacagtggctgactttgtttttggggctccaaaatcactgcaagacagtgactgtagccagggaattaaaagacgcttactccttagaaggaaagttataaccaacctagacagcatattaaaaagcagagacattactctgccaacaaatgtccatctcgtcaaggctatggtttttccagtagtcacgtatgggtgtgagagttgaactgtaaaagaaagctgagcactgaagaactgatgcttttgaactcgggtgttggagaagactcttgagagtcccttggacagcaaagagatccaaccagtccatcctaaaggagatcagtcctgagtgttcactggaaggactgatgttgaagctgaaactccaatactttggccacctgaggcgaagagctgactcatttgaaaagagcttcatgttgggaaagatgaaagcaggaagagaagatagacagaa

SEQ ID NO: 64778 - DNA, 1510 bp, Bovine  19866881075725
  misc_feature (1)..(1): n is a, c, g, or t
naccctctctggctagctcttggaccctctctggctagctcttgagacccaggagaattatgaggatccaatcaactgaggacattatgtaaaaacactttaaaggccataaggtgctgtagacctataagaaattctttgtagttttttttttttccctcttgaaaagttttaataggcctcattagaattgggccagaagaacttgagtgatgttgagacattgaagggaaaaccacgtttctccaaatttgaaaattgccatagaagaaaataattaggtatgaataattaccttggcaaatattaccattttaaggagtaaaatttcattttaaaagtaaaattttcattttcatttgcagtataatcgtttagataaaggtaaaatgaagaaaaactgcatttgatacaggaataatagtggggctagagtttgatcaaattagataataaaacagtaattccatttctaggatgcattttattctttaatatgcatgttccatatgaacactgaaatccagatgaatgctaattagtaattaatattcatcaacttgtataacagtcctcaacataatggtgattagctttagatatttatagtatcatgaattagttagagaaatgcatcactttcattaggagtacattatgttccatagaggaatttgtgttttgatattgagaaaatacaatgtttttaaatgcgggattgcaaggaaactgacacatcagtaaagttgaatggataatgaaatattttccaaagagttaatttttagtcttttcatattccttttttttttcaatccatggcaaaaattagtctgtcaacaagtatttctaaccccagttagtcttgtgctaggccatagaaataggcaccaactctcaaggttctgtccctcttggctactcaaggacgtagccctaacagttgtcctttgcttcttctgcatcttatttttctttctattaatattcttatcaacttctaaacatgctgttatcttactgtaaaagcgttatatcccttcagagtatcctgttcctacatgcagcttaatacctatctcctcccttgatgcccttgtcctgttgcactttggtccatcagcaccatttgatcccatctatcattgtctaattcttgcctttcaggacaccattctccactagtttttttgttcgctttacagatagttccttctttgtctttgttgcttaaatctaatattcctgacatccaaagtgtagaattcccagggcttggtctaagacaatttctattttctacttcagttgcatatttttgtgatctcatctgctctcatggccataaattctactaatatgccaacaactcccaaatttatgtctacagcacagatctctcctgtgaattctaggctaataaatttgactgatgactctacatccccattgagaggtaaatacctcaaatataatatttctaaaataaatccctgatattctccatgaa

SEQ ID NO: 64779 - DNA, 2393 bp, Bovine  19866881101043
  misc_feature (1)..(1): n is a, c, g, or t
naatctgcctgcaatgtaagaggccttggtttgattcctgggttgggaagttccctggagaagggataggctacccactccagtactcttgggcttcactggtggttaagacagtaaggaatccacctgcaacacaggagacctgggctcagtccctgggttgggaagatcccctggaggagggaacggcaacccactccagtattcttgcctggagaatccccatgggcagaggaacctggtgggctacagttcatggggtcaaaaagagttggatatgactgagcatacacacacacacatatatatatgtgtatatgtgtgtgtatatacacacacacacagatacacacacacacacacatgtttcatcaaggagagtgtttttaaacatccactatgctaaacaagctcctaatttcagtctggaaaacccatttctagtgcttgttttgctaattgatatttcttttgcagtcaatcttttctggcattgttcaagataagagctgaagttgtaaaggctgactctagagtggactttctgattaaatgataacagaccacccttggagtgtgatttactgattagaaactgtcactcgagtacagcttaacacctacggtaacatcacaccttctatatagaaggtgttttaaaataatttacaaacatggtaatgttgattttctctgaacaggatcagaaagtggcattcttttttaatcccaaccaagtacaatgtctggcatggagaaagtgttgaagagggagagattaaatcaaattttgtgggggctaagtaaatgattaaaatgaggaattagccatgaatgactcatcctatcaattttgccactggtataagtgggatttgctcagtctccttgaaaacaccctgccttagaagtaatctatcatcatcatcaattcgatgatttttttttaatgaaaagggatgcaattatttaaaaacataaacattttaaagtttgttctgaacattcaaaaatatttattatagaatttttaccactttacatttgtgtataagatgtacttaacaatgtgacactaggggtattgaaaataaatttaaggcaatcatatttctaaaaccaaaatagtaattgctatttaatagatgtatttcatcatagaaaattatgatagcttttcctaattctattggggttttgtattttcttcccatgcaatctttatgtatctcatttctagctttcataccagatatttttagatggctgtatttaatattttaaatcattctattgtacttactataggtcaaaagcaaaattgcctcttccaaatttattttattttgcaaagtgttcttttcaattttatacaaatagaaactgaaagataatttacacatcctttttctcagtttgtaatatacattttaaaatctgaaagcaatgactgtgatttagattgtaacattttttcaagagaaaataaaatctttttcaaaaagatatatgaagtgatgtgtgcatgcaaaaaaaaaatgttctggaaaatgtacaatagtctaacttccagtcagattattatgattgcatctttattttatagtaaaaaattagaatatatgaatgtgttctagatttttcaaaagtagaaagtgtgtgtttctgtatgtaaataagatgtaaataagtgcataaaattattattatcaagaattaaagagttttcttcacagtcaatgatgaagtaaattagagctgcctggcaataaaacaaatatcagtttcaaatgaacattttgttttaatcttaattttacatttgttaactactaacaagcaaagacctaatagtgttgtagaaatagggcttccctggtggctcagatggtaaagaatctgcctgcaatgcagtatacccgggtttagatttctgggtcaggaagatcccctggagcagggaatgacaacctactccagtattcttgcctggagaactccatggataaaggagcctggcagcctacagtccatgtgatggcaaagagtcagatatgactgggctgtttccacttccacacttttctgtttgatgaggtacatttttttttccttctacacatgttatcgcatttaattctcatcacagccccagggcctccttcactgcatgaccctgaacctcaggccctgcacctatttttttaatataaatttatttattttaattggaggctaattactttacaatattgtagtggttttttcatacattgacatggatgtacatgtgttcctcatcctgaacccccctctcacctcccacccaagttcatgaacttgatgcacagtgaggccaaacaaaccaaaatgtcagagttggagcagaaaaa

SEQ ID NO: 64780 - DNA, 1584 bp, Bovine  19866881107513
  misc_feature (1)..(1): n is a, c, g, or t
ncatccagcatcgtgcattgaacctggactggcatctcgtttcatacatgacatttcacatgtttcaatgccattctcccaaatctttcccaccctctccctctcccacagagtccataagactgttctatacatcagtgtctgtttttcttctctttttgtatgtcttaaacactgagtctcaaacacaagtctgaagaccaggactaactactttagatttactgtataaacatttgaaaaatacaaattctaggccaaggcaaaaggagaagagggtggccgaggatgagatggttacacagtatcacttactcaatggatatgagtctgagcgaagtccaggagacagtgaaggacagggaagcctagtgtgctgctaggaggtcgccaagagtcagacacgacttagcaactgaacaacaacaggctgctcactctagattcttgttattcagtagatctgggatgaaatacaagcagtatttttcaaaagttaaccagatgattctgatctgccttcaggcttttaaataacattctttgactaagaatttatcacttcaggaatagaactggaactcaaggacacctcatttataggaagttagcataaaatttaaaaatatatacttcttacagcatgcatttatttatgaataatgataaaattaaacaaagaaagtacaggtattttcagaagtccaattttacctttctggtttcagtttcaattttcaaggtaaacttttcttttgtctattataaacgtcaatgggattaaattattagcagaaaattacaataaagactgaatatttgaatcacattctctcaagccattattcctttctacacgttcaggctgtttttcagttaagtttatgaatccttccattcatgtcttccccatcccttctaatgaggtcattttaaaattaatgttgaatatctcttttagagtttgagtagttttcaatttgtctttctttggaaattccccatttgatttctggatctcacacaaattcttttcttgctcaagaagactgagcacagtggtttcctcacagcttcgtggggtgactgccagcagaagtcttccattttatagccagggaaaatcatggtgacagtgaaattactgtgaatgaaatttatttttctgattataacactcatccactcctaggggtaccctgtccttttgccaccatcagttgtcacacttactttgaaataaatgtgaaaaggttatgtgaaaataagaaattagtctcacataataattcacatttttaaaatacttagagcttagaaaagaatattcagctacctcttctgtcaccttggtgtattcgctttggcaactggatctgatgcattacaacaggatgtggatatctgctctttcagcaagacaatacacatttcattcgaagacttgactagattctttatgctgaacttggggagataagctaactttcctggagttgccaagggcaacttgattgcacatgaaattaggaactactcgaaaaaataatgtctagacacattcttatatttcatttcggggaa

SEQ ID NO: 64781 - DNA, 922 bp, Bovine  19866881138769
  misc_feature (1)..(1): n is a, c, g, or t
natgcacatgcacacacgtgcatgcacacacatgcacatgagcacacacacatgcacacacatgcacatgagcacacatacacacacgcacgtgttcacgcatatgcacacgcacacacatgcacacacacacacacacacactataccccacaatgtaatatactaagtgattagacttgaggttttattaaaaatcaaatagaaagcaagagttaaatcatggcataaagttaatgaactttaaaagcccaataactcaaaatttctagagaactggtagaaaggaaacaaaaaaaattaattgcaaattaaatgtgatgctgaccttaatgtttttattttaaaagaaaaatggtaaccagtttggtagcaataataaaaggaggaaagggtgtaaaatccgttagaagttttctcaaaggaggtggcaagatttctttgaaaaattaaacttccagaaaagtatgggatattttctttatttttagttcaaaatctgttacgaagaaagagttccagggaagagaagtataaatggcagcaccagacctccaaaactccacagacttctaacacctccggggactgcagttgtctcctccgcctacagatttcaatcattcctgcagcccctgccttcagccatctgaggacactccatcaatataactgataacaaacccaatctgtgtactggagggaaagttaatacagaacatattcaaaataccatttatcccagaagacatgctgacatcctagagttaagaaatatggtttcttctcacattacatcccttatgaataattgttgacttctttgttttttgattgcaattcaaatgatgaattaacagaaactgtaagaaggcatctagaggttgtgcaggtgaatggagcactatagcatgtcaatccaa

SEQ ID NO: 64782 - DNA, 1103 bp, Bovine  19866881148690
  misc_feature (1)..(1): n is a, c, g, or t
nccaataatcacaatgcttgaaaaatgatccactggtctgaacttttctgacattattttgagggaactcgattattcacatatgagtaaattcctccagttatagttaggaataaaataaaaatatgatgtaggccaacattgtatgagttaaacagaatacatctgtgaaccatccgcggtcctccaggagccagtttgcaacctctgataggaaaacacactcagtattgcacttagatttgttaagagcagtacaggaagcgaagagaggaaggaatgaaataaatcactaaaacatttcaaaatgaatgtattcctcttcttcttcttccagttattcaacagacaggatgtaaagcatgaagtttaatacctttaaggaagaagataggccctgttcaatagactgtttaataaatcaggaatatttatgtcccacttagacacattttgaaaacatatcctccattctaggaagtaaagctaaataaattatgttgtaggaggattgttctatgtcattaaatattttagaagttttatttagaatatttcaaaattgcataatgttctatataacgtaacaattccaagtggactttaaaaagacatggatatctttctcaggctgattgtactatataaatttatgtatattaatgcaaagtaactaaacatgaacacctgcacacactacagattctctttacaattaattctaagcatttattgccttaatagtcatatggtactaaaaatgtgctacttttgacattatattacattttgttgtgggcatgccttattggcactgctaacttgagtctccatgatagtaaagagaattcagtccaaatctgcctaattccaatacttatccaactatatcatgttgcctcattcttttgtatcacttataaatccatgtctgacacacagtagataataagtatcaaatgactacatatatacataatataaaaatgtgtcttagcatggagcaagtgggaggttcatatcaatggaaaaggatttatagtagactgaagtgcatataggcttgtagcccaatttctaaaatttaaggttatgaatacctg

SEQ ID NO: 64783 - DNA, 1743 bp, Bovine  19866881170495
  misc_feature (1)..(1): n is a, c, g, or t
ncaaatatatgcaatgtacataaaaatccactaaatatgtataatggtaaaaaaaaaaaagatttgctttgaaattgtatgcctgcacacatcctcagacacaaatatgttctttcccaaatttataaagacatttttgaaataaaggtgccatgggggttattcggaaacaaaaagttattttgagaaaagcattgcttctggatgcagaggcttggggttcatttcccaccatcagcagtaatcattgtgctgcaatttgtgggattttgatgctctcttttcctaacatttttgcagctaatttccctctgttccagaaataaagtatttataagcttcaaagattacaagtaaatctcttcaatttactctggattctgtattgtactcttaatcagagcacttttttaaaatgcatctgtgtctattttaaatactgtaagagtgaggtaatgctttaagaatttatttattatttaacacaattgtagaagtttcactttaaaaatccatacaggaattaatgaagggagaacattgaaacttaagcattttaatctgtagataaaactgaattgaagcttgaatttttcgaatatgtcagggctgcagtcattagaattctatgagcactgaaacataaaaataggatttttcccctcccattttttaaatctacattaaagatgttaatgggctttcctgatagctcagctggtaaagaagctacctgcaatacaggataccccagtttgattcctgcatctggaagatctcctggagaagggataggctacccagtccagtattcttgaacttccctggtagctcagctggtaaagaatccacctgcaatgtgggagactggggtttgatccctgggttagaagatcccctggagaaggtaatagctacccactccagtattctggcctagagaattccatgaacagaggagtctggcaggctacagtccatggagtgacaaagagacggacatgactgaggaaatttcactttcacttttcaaagatgtttaatatattgaaggaaaaaaaatccaccagtgactactgttaaatgtcaatatttctcaatattcttcccatctccattgcttcctctcctacatacatgtattttcaagtttgtcgtcacacacaagcacacaaagctacttgtgttatggtgcatatcatactgagaaaatatcatatctgttgaatttaaagatatagctcaggggaaatttagattttcttcaggaacacatttctctttctgactttcattttctcaatgatatttaacatattgaagagatatttaaacatttaatatattgaaaccgtaatgaagagcattccctatgagaaaagggagaggaaagctgaaaaacagaaaaagaatggctagaaaaaacagcagttctgagatgtggagagatgagaaaagaggtggatgtttctatgtcctatgaccaagaatgacctattctctacactctgtatcccaccctccaataaggcctaggagggacagcaatgcacctgaaagaaacagctggatcgtgggatatatggactaccagctttgccaagccttctgttccccaatgtgaacagaagcaacaaaatggcaatcccgcaatgcgctctgcggaacaagaaagtgagccgtgtgggagtaagaaagcaccatgagaaacctcaagtgctttcgaactgttcaagtcatgag

SEQ ID NO: 64784 - DNA, 1078 bp, Bovine  19866881239641
  misc_feature (1)..(1): n is a, c, g, or t
ntttgtaggaatgtttacatgcatttatacatttttttttactgaattatttttatctctgatagctttcgctgagaaagggcagttgtgaatttctgacaagttagtacgtgctgttgaaaaagtgtgaaccaagtaattaaatcctatttgaaaaagaagatagatttagccactgctcacacctcttcaactcctcttatcaagctttagtagttgcttttttgaaataatactgcaatttctgttaacctcaatggacagttttaggcaaaatatataatatggttttctacactattgataggtttatggaatatttatttttcgtttggagagtaaaaatcaacccaaatagaaatttaacatacagatgctttgtctttatagataacatattgaaaatgcaccagaaatgttttgataggcattttcatcacaaggactgcctatgtttgttctttttgataattttatgtgatatttgattaatagagcatttaagtaatgaattcaattgcagtagaggcattctggctctcagtttagatcctgaaacatgaagatttaattacctttagtttatctagatagctacaagcagcataattggtcataaagttacatagtgcttttttttcaaaactcagacataatatttgactcaagagcattttgcatcagtgaattctattagcggatacaatttgttggaaacagtctaattcttttggaaaattgcatctttcttatttgtatatgctacacttttattggaatagataaattttgcaagaaattaaaaaataaatgaatcatatttttgttatagagtaatcttatttgttaataaaaataatgcatgtaatccattaattgaagaacataaatgttaatctcagttattttgcatgagtactaaatcgcttcaatcatgtatgactctttacaaccctatagactgtagctcctgcaggctcctctgtcctccactgggattctccagacaagtatactggagtgggttgtcatgccctttctccagtggattctccacccagagatcgaacctgcatct

SEQ ID NO: 64785 - DNA, 1092 bp, Bovine  19866881332117
  misc_feature (1)..(1): n is a, c, g, or t
nccttacgtatagattctgcatcttgcatttattgtacatcattgctttaaaatcaattggtggcctcactttactaataccaaagatgtataaagaagcaagaacctaatttatggtaactaaaccaatagaagagaaatataaaacaactgtataaatcttataatttctagagaagaagtgaaaaggtcttcattttcaaaaattttcagcataatgctctttacttcgggatgcttatccaataagcattgacactgaatgcattttaaagaactgagaaccgtgaaagcatactctagtcatagaaaagtgtatgttttcaatatctatacatagaagaaccttctgacacacaagaaattgaagcagttgattcttttttaaaaaggagggcaagatgttaaacaaattctttgctaaaagagcaatatagaatggtcacaagaagacctagaatcactcagccgaaggcaaaggacacttgtaatcaagggcactaaacaaactactgtttgtaacaataaactgagtgaatgaagtttattttgttgacaccaagtcagcagcatacgagctgaagttattatgttcaatatcctgtccctaatatggggaacgttgttcaagttttaactggggtgggtgtacatcagatagaaacttcagtgagggaggaaaagtttacttgctgttgataatgaatcctcaagtgaaatgaagggaaaagatctaaggcgcaatgttacaaaaggcaataaaattaaacaataattttatgaaacagcaaaattttgaaaaattttttgaaattttcagaagtttctttttttaaacatgttttcaaaacccttggtacacacttaaaaagaccttaacatccatgtcttttgttacatttcactggttaccttatttaattcttccttggtgagagacgccaaaaggggtttttctgaatcttccttctttgtacttctgagtgataaaattttttctcttttctactgaacagtccatgtgtaattcttcatctttttgaagattacccagcccaaaagtcatttagctcttttgtttccaatgacaat

SEQ ID NO: 64786 - DNA, 2053 bp, Bovine  19866881420484
  misc_feature (1)..(1): n is a, c, g, or t
ntctaatgagttggctctttggatcagttggcccaagtattggagcttcagcttcagcatcagtcctcccaataaatattcagggttgatttcctttaggattgcattggtttatggtctgtcccttcctccttgtgcctaagctccatgagggtgaggataaagtcctgtttaaatctgtactgccatataacatggtgcctagcacataatagagtctcattaaacattcattgggtaaatgtgttacccttaaatcagtcctaaattcaatatgcctattcttaaaggcatattgttctttattaaactttttttgtggggaggaggagggggattccaaaataagtagaaagttggtttcaaaagcccagagaagtcactattctttaagacctcttaaattatatattcaatgtatgcatggcagttggtgctaaccattgtaccaaaaatcacaaggaaagtctagcatttttgtaaactaatttcagtccaaatatctttagctttaggacttagatgattgagaaacaaataatttcccactaaaaaacagtgatgggctcagtgaatctgtcattctgtcagataaaggactaagggaccctccttgatttactctagagaattttttaaagtagttcctttggaaaagttttcattctgcttaaagctatacttggtaaatgatgcccaagatactttaaactcatctaaattattgcatgtgtaatagacacatcactaagagaggaaagagcaccagacaccattgtaaagaaatattggaaagtgcacattctacatattaggaaattttattaatgaaggaatgatgagcactgaaagccttcattatccttcttctgtgtgaattcagatattagacttcaactaaacgcagcaagtatttattgactgacttctgcatgaaaggtgttcttgaatttagatactgaggataaatagataatctgaggaacctttcttcaaaggatgaactcaatgtaagcaaatatttgtaacacaagtagcaaagtagtatgtgcaaaatactatggaatggagggaaaaagaaggaacaaaaatctctagtttggaggatatgtgatgaaggactttttaggaaatcggaagtaaactgaatgcttgctggggctttaggaccatagggagtaattcagatcagacggttctaactttggtagttttaatggccttgaaaatctgaggggtgagttgtgctgggaaccacaggggttgtagaacagaacagtgtgtgtgagtgtgtgcacatgtgtattttttttgtgttatggagagacagaaccactttagtgaattttatgcaaaagatatctcagttatattttaaaatagttgaaagtgtataaagtttgaatcaaattgaggtttgattttggctattctgtaattcaggcttatatagcaggaatctaagaagttgttctaatatagtaatagtactcttatgctttaaataatcaacagggttgaaaagtctctatagttcatatatttttaaatagaaaaacaggatcctcagtaagcaacccaaagtatttgtgactcaaatacttatcttccttgattatatttatattttctataaaagggaggtttacagaattaaaaaagaaaagatgcagagtgccagcaattactttgtctttgaggtaagggaggggagacaggaatcatatccatgtcacttcatataattgcagtagtaaatttttgcatattggccttcatttctttgtctcctttaactttggaacatgttagactttactcctctgtaccttataaggcataacatttattagctgggatattatgaatagttgttaccattaattactttgatactaaatcaggataataataatctgtttcagataaattaaaagttgctttgttttatgaagtctgacttgtcaagaggaaaaaaaacttttcctatgcttgaagaaagcaaacctctaaactgagaataatctaatatttaagcaagacaaatacaata

SEQ ID NO: 64787 - DNA, 1611 bp, Bovine  19866881423001
  misc_feature (1)..(1): n is a, c, g, or t
nactaaagaaaagcgtttgtattattttagccctatgttttttctgacagaattttacttaaagaggatagtgtttttcattttaatagtaccaagtatttccaaataggacacttcatacaatttagtttcttatactgtttttccccatgctggtataaattaaaaaaactgccacaaggaagcctgtacatggatatattattttttttagatgaaatgattttataattgagttaaagaatctcatcccttaacagaatgatttttatgaatatgtgtctttttgaaagcatcattctgcttaatctaaaataagtcatacaaatcggtagacagtggtaggactgagtgctcgtctgaaagttctttttttttttttacatttgcaatattttccccatgtttattgaactataattgacaaaaattgcatttgttataaaaatatgtttttgatatacatatacattgtaaaatgatgaccacaatttaagctaattaatgaatgaattaatagtcattacctcatatagttttgtgtttatttatggtaagaacatttaagatctactatcttggcaggtttcaagtatacaatacagtaccattaactgttgtcaccatgctatacttagatttcgaggacctattctctctgcacaactgaaatttagtacccacttatcaacactttcccatttccctcagtcccagtccctggaaaccaccattctactccctgcttctttgtgagtctgacttttttagattctgttcaatacatgtaaatgagatcatacagtatctctcagaaagaatgttctttaaagacactgaacacattttgtttctatcacagcgacctcaggttatggaattatagtgttaactgtttgaaagttgtctttatgcatctgtcagaatcagttaatgcgactgacactttcatttgcacagtaaggcaggcagatgagggacatggttttcctttaaactcaaaccactgttattttcatggtgttattttgttggttatttctgcatgttgctggtctttcgcttttaatattgatggccaagtcattggcaatgtttgcttttcaaatgagtttacagtaaataatcaatagtaaaaatcttcaaacttatctgaatacagatttggctctggttttgacagttgcccttaatatatgtatgcttgtatatatttagaaaatgatttactgagaagggagtagaaattacaaattgaaaagtatatttaaagagactgtgtgttaattagagataatttatgaatgctcattaacaacaaattagagtaatacacaggggaagatatattttgttttgagagtttttcctgcacagaaaatattaattaaaatgttttcagacttgatttacataaaaggttagaagtttcaaagaatattaccattatactgttaatggtgtcaaaaaaaaaagcaaatggggaggggattgggttgttaaaatttacatgcactaataagcaaatttttctcattaacaaggataattttttaagcacactaatttaattggttcaattaaaattttactttgaaatacagtgcctga

SEQ ID NO: 64788 - DNA, 1184 bp, Bovine  19866881439682
  misc_feature (1)..(1): n is a, c, g, or t
nctctggaaaataagaattgggatcagttcctcgaaatactggtctccccatgtctttctccctctcaaactctggttgagtctccatctggagcgcggaacccaccatgcttactaattatgcctgggcttctaagatccgactggggaggcctcagtgtctcctctccttcaggagaacggaaggacgcctgcggcctacgtaagtggtgcaagcttcttgtcttgaagttttattggtctcccgcataaaccaagctactcagcctcttttctccactgaattttcctactgagctatgctcattctattactctttatatcgttgatgaatatttaaatagtcaccgaagccgtctccccttcaaataccctggatcagccggggctggaccctggcacttttcattttgaattatcgaatacttagcttttcctcactatttaataaaataccttaaaattttacagagagtaacgttttgtctggcaaatattaactaacattttatcaaactagtattcccattactcccttccatcctttatatctttgaaaatgatctttctaaaatttaaatttaattatattaatcctctgcttgaaatcctttttaagtaagataaagctgaaattcctcatcaaaataaggtcctaatttgtctagccattgccagtcatttcaacctacatcttacttcattttccctggttactctgtcatcaccctgacactgcttaagccctttctccacatgatgcatttgcaatgtgaatatgatcatttccatgttctgctcaacactctgtaaaatcccctcatcatctagcacataaaatgcaagctcattaaaatagctttcaaggtcatccatgatctgtttatagcctcactccacagccccattttctatcatgcctgacttcacacttcatgctcaaacaacataaaactgtatacagtccccagagacacaatatgattcctaacctctgagtctttgctcacaccaagttctggtttttttaaatgttatccctttcttgtttatgtctctctcctaactttttgagtcttaatccaggtgttccttgggcttcccaggtgacattggtggtaaagaaccacccacttgccaatgcaagagatgtaagagagggccagtttgattgctgggtaag

SEQ ID NO: 64789 - DNA, 780 bp, Bovine  19866881829215
  misc_feature (1)..(1): n is a, c, g, or t
natgtataatatgtgtgtatgtatatacatatatgcatgtatacatacatgcatacatgggagaacaccttctttaaagacaatgctcaaatctcttcttttgaacccattgaaaacatttaacaaaaacagaaaacaaattccatatgtttatttgcccactgagaaaatgaaagacatataatcccaataaatatctatctgcatactctacatcaacattaaaattagaagagaaaattgagtgtattgataactgaattttcatgatcaattatatttgcttcactaaaatgaatatcactgaactagttaagagaaaaaataaaacaaaaccgagctaaaatgataaagctgttcataactctttccacgtgagtaaaatattcactgttagacaggtgcctcaggtgccctttctttgggaaataaagaacaaatctgacaaaaggattgtccatactcagcagtgtccaaatgttgatgatcatgtcgtttctatctaaatatttttttttctgtttttcatatcctgctttgaatcattccattggagcccagctaagctcagtcaagcttgcaaggctgaatgtgcctgccaggcaggcttaactatttcttacatgcttagaggatattgaaaaggttactgtattaaaattgttgatgtacatgaattaaaaccatcctttctcagatgtaagccagcatgtggtatttctgaagataagacaccctggtaataattacaaataccgaagctgtcgttcatctaagcta

SEQ ID NO: 64790 - DNA, 1702 bp, Bovine  19866880423243
  misc_feature (1)..(1): n is a, c, g, or t
ntttagagatcatctaattagaaattcagcaggactggaaactttgatggattctaaagtgatgtgttaagtggtaagacatctaggaaatcttgatgaccaccgtcctccaccatgtgcctaatgtctctatttgcaaatcccctgagctcagttaggacaagtgagggcccagtttcagaaagaagagtgtgtgcaccatgtatgcattttcagtacatgcactgaaaataattgaaacaaagctgtgactgtagcagctgaggtaagaagttgaacaaggactgtttactatcatttgagtattctaatttctttcccaggattctcatggaaatcagtaagaattcttgatctttttcatgtgtagtacagtcttttatgtctttatatatgtatttgtttatagtccaacccttttttggaaagtggactggagatcattcttttcctcatctgtttaattttgaagaaattatgggacccagtccattccccaccaatacagaggtgggtccattccacgctagctaccagactctatccttggaaatcacttactacatagaaacactcagatgtggaaggaaattggaagagggttgtctgattataatgctctataataaatttgaagatagtgccattaaaatacttgaaactattctgattttgatctggtctaagatttagtttttagtttttgattttgtgaactacacatttttaaaaaatgtattctccccctccttaagcataattggtttctgttgatggcaaccaaagaaatatgacaaaattaaatacaaaaattggattctaggcaatagacctcaagaaaatgtgagttaccttgatttaattttttgagatagagtaatatagtaagattcctggataagaacataactgctcatgttctatcacagcaagaggactaatcaagtctactcaccaggagtcatgcacccactgaggatgaaactctctggcactggaagtgaatccaaaaggctaatttaaaggagataagggatgccagacagtggggtggaatatttgatcctgatggtattggctaagttaaagctagaaaaacaagctcatgttgtgaaatgctctctcaagatataaaatgaaactattagccttcctgtgatagtgctaaaaaaataccttattgattgtagcagttgctcggagatcactgaaaatcaaactgggagattgattttttttttttttgagttgctgagttatagcagcctttggattaataaccttgccaagtcttttaagtgaaagttagagccttgatcaattaagagtgagatttttataactgaaacaataaaatccaagaggattttgaaaggtctgagaactctgaactaatgaatccatctgcagtaattttcactgttcctttcttggctgagtataggcgtcttttgtaaaagaaagtcgaaacatccactagtgccttactgcctctaagtaagtaggattttaaaaatatcaacatcggttaggtgatacagtgaaaaaaatcggagtaaaaatgattgcaggaattaatgaatttaaagtctctggggaaatggatattttgagtgcttaaccatggatggttagacacaactttggattgggctaaattttttcaaggatgaacttactagagtttctgtacttaatgtgg

SEQ ID NO: 64791 - DNA, 1150 bp, Bovine  19866880958240
  misc_feature (1)..(1): n is a, c, g, or t
ncaagcaggtcgataaggacagaataagtgtcaatgtgaaagccagtctttgaagtggactggtgagaagaccagtcagatgagaggatgtacataagggaagggagtagtgaacaagattttaaagatagaaaagccagattctgagtgccaggatggactagggactccatatttggagggaaaaagaagccactcagcagttgacaaccaggttgataagataaaaaggctattttaggaggtttaccctggcagtggtattcaaaacagattgaaaatcactgcatgttaaaattaacttatgacccaaatctactaaatactttggggatgatatatttaaactaaattttcaagcaggtctgtcacatctccaattccgaatttgttacaaatatccaaatattattttcctattctttatttaaaaatttagattttagaactgttttaagctcttaaaaattcaatactctatggcaggagtgtgatatattttatttacacaattttacctgctgtgacagatagtttttctgcctaaaactatttcatacaaatattatatttatatttaaataaaattaaaatttttatattttattaatatttatttaataaacattatatttattatatttagaatatgatttagtttaatatatgaactattgtttgcatatatcattcatcaaaaatttatccaggaactaattttaaagaatgcctaaatcaaacagcttctctgtaatatttttgactcttgaaaataagcagagaggttaactgtttatcatgtacttttgtggacatatttatatttgaattagtggatatctaacctgaggattttagttcctaaaagttttctttttcctctaagacaatcttgttaataaaattttataattatggggtcaaatgatgaattttccaccaaagaagaattttgctttatttattttcaataaaacttagttgtattgtaacatgaattattttaatcaagtttgttagttaaccaatgcatactgaactaaaaaacaaatcttgtttatgttgtagttttaaaatcatgcttgcttgttgaacactgttggtggtctgaattctgaccttcaaccattatctgctattcaaaacagca

SEQ ID NO: 64792 - DNA, 1302 bp, Bovine  19866880449941
  misc_feature (1)..(1): n is a, c, g, or t
ngctcttcccacacaccactcaacaggctgatttttttctctttattattagacataatatataaacacataaaacagaaaacagcagggatcctcatgggcctcaaaaaccagcagggaaggaagaggccctgggaaactttttttttttaaagtacaagatatattagtggccggaccaagggtgtggaaggcaggccagagccagcagagctgaactataggctccttctctccccacagagccaggacagccccagggagctctcccccagcagccagtccacacaggcagattgctgcctatgggaaaactctacgatggagagcctccccctctgggagagaagggcagtgcacagggtaactaaaagctccttccttccatcctttttccctccgtggctgcaagtgaggaaaaggaaagctgtgtcctatgcacactgactcctcccagctgccctgggccctgatacgcccatacttggcatttaccaaagtctgtcccagctcagacccaccaggtgcccagagttttgctgaggagggaaggggaggggaaaggctgggtatgacaccaaatagatctttatttgcagtcgtcactggggccgtttcttgctgcttatttgtttgctggcttgctcttctagctgcatggccaggcgcaaggccttgatgacatctggaaggcaggggtggtgcacttgaagtcagcaggtctcttggagaccctgttccctcaggcagagccaccacccacccacagaggccccaccctccagctgcacccacctcgcagggctgagaagtgcttggcttgctgggccagggcacactctgctttattcacaaaggtctccaggtcgtagtctggctgctcagccatctcggagagctccagccagcctggcccttgctgcagcgacacaagacggaccttgtcaggtcaataatgaccaaaccaatttagcaaatcattcccagggctctaccatctgcaatgcggatgcctgttcctctagccatggccctggccctgcctcctgacccttcccccataactctcagcttgaatctatccttcccctgcctgccaaaaacttgtccctgtccctgatatcaaatgcatatcttgatgcccaagccagaaatctgagcaaaaattctttcaccttgtccctcaatcctaacaactgcacccctgaaatggttcttaaatctcatgtcatcctgtcaatcccaagaccatggtcacagctagtctaggcaccagtgtctctcctgaactctactaatctc

SEQ ID NO: 64793 - DNA, 4010 bp, Bovine  19866880494754
  misc_feature (1)..(1): n is a, c, g, or t
ncaagaggccagaggaagctgccttgttctgggagctgcgtgcacaacatttgggtgtggagctcttgagcctggaagggaggtgatgccaacaccctgaagtggtttccaaaaggaggagaaggccccctgagggagctggctgagagggagtggcctctcatggtaatgatcccgtggactccgcagccccagcgcctgcacgcttttacaaggttaaagcaacagcttgaacctgtatggggcgagcatttgtttcctttccagattgccagctaatgaggaaagattaaaggagctaaatctgtttagcttggctaagtgacgaccgaggcggcgggagtggagaggcatgctgggcctgccgggccgaggaggggtgtgataactgactgcagatttcagaaaggtgtctgtcgctccagcgcaggaagagtggctgtctcgggtgggcaaggggcctcagcctccctcagtgggaggagacccagggagggtttcccagctgtgagcgtggttgctcatggtgcagtaggtcaacctgccgagaagaggtcagggatcaggacatcctggctcagctaagggagggaccacctgtccgcaaccagcagccttcacttagccctctgctgacaccaccttccgcctttgcgagggtcttctctcgcccactgctgtccccacggcagccagggccttaggggttttggaatccaaaaaggttaccccacttgcaggcctatggcagatgttcttagtaactggtttggggattcatagccaggctattctttgatgatgtcttcaaatagagtcttccaagcctgtgagatcagaaccttctaggagcagaaagaattttcccttagggggaggggggatctagtgtcctggtccagcgacccaggggtccccaagcctggacccttaggagaactaggctgcctctcatcctgcttcctgttggcaatctcacagttaaacacttaaacaatctttctttctcctgctttctctctccccctctctctctttctctcccttcttttcagagttgacaggggccaaataaaggcccttttaaaaaaaacacacaaaacaattttgttccttctgaaagtgatggagcgaaagtgagtgtagattatagccctgtgaggcgagggccttcgtgatggggggagaagtagtgacatgatgggaacctaatggcagtaattggccttggctttgacagggcccatatcacagctcaggaaaagagagatgtttaaagtaaaaatttacacaaaattatatgttttcggggtgaaaagactgtttggatttcatttttttccttcctcttcttccccccagggcatggttcctgggccttctgccggtgtgtgtctatgtgcatgtacacgtctgtctgtgtgtgtatgcgtgtgtgtgtgcacacttggccatgaagctgtcccacaggtatatgtgcattttagccctgcgttgtcagtaccttctgttttctcccttattcaagtggagacattgctcagctttggaagtttctcattccgaagcaggaagagcctaagagaaggaaaaaaaaagagaactattccaaataatttaagaggccacccttcataatttcaccaaagcaacacttgttcagtcttaacacagtcaactaacatcttgtatttatttatccttgtagttcttagtcctaaataagaccaaggaatagactgggccattgtgcctgttcagtgtctgattcccattccagaatgtgagccctctgagtgcaggtctctctttctctggttcaaggccgtagtccagcacccagcacagcacctggcacatagcaggcttccagcacaagtggcccaggatacccgaattctgttgagacagaagctaggttggaagatcataactgcctgaggattaagtgctgataaatcagacttttgtctcaggtactagactattcagataattgagtatttttttttacttaatttttattggagtttggttgctttccaatgttgtgttggtttctactctgcagcacagtgaatcagctgtacatatacatatatctcctcttttctggatttccttcccatttggtcgccacagagcactgagtggagttcgcagtgctattcagtaggttttcatcagttatctattttatacatagtatcaatagtatttatacatcaattccaatctcccgattcatcccacccaccacattcccccttgatcaatatgtttgttctctacatctgcatctctatttctgctttgcaaataagatcatctataccatttttgtaaattccatatatatgattaatatacaatatttgtttttctcttactgatttacttcactctgagtgatagtctctaggtccatcgtcatctcttcaaatgatccaatttcattccttttaatggctaagtaataatattccattgcatatatgtaccacatcttctttattcatctgttgatggcagataattgattcttcattgcttattagaaaagtgacctgacaggaagacatccaaaggtggcaatgcaatgagaatattaggtgttcatcccttgttgtgagcagtcctacagtcaaactccgatcaactctttaatactaatgaccattcccagggtagcatggtctactcagggcctgctacttgtactgcagctcactgttttacttggatttagacaaagtgtatgggctaagatgaggtctagtcacctagcagtctacttttgagctttctaaaaaaaaaattccatttgactaacataataacaagatgcacaaataaagctaaattgaatgtttttgcaacatgagttcaagatgaagtaccagaatcacagaatctcaggttgggaagggtctttagaattctgaagtacatccttcactagttgccttcgcaacctctacaataactctcaagttccagttgtgaagattggtgtgttcagccaggaggcagggttaagaaatgcaagaattaggagctgggctgggcaggaaccagtcctggggaatcggtcagtcgtgaggaacaaacagacttagaaaggggagacccagcaaggactgtgccagcgagttgctgtggaggtgggagtccattctgaaaggagaggtctgaaggttggtgcagaatgggggtgtataggtattgggaacagggccaggcagctttctgtgacccccctggtttacctcagtgtttgaagagaatttcaacccaggcaactcaggatgttccaagatcaccaggggaatccagaacactaggtgggcattgctgggggtgggagaagggcagcagtgtctagaaccaagtgagaatggtgcttctagagctgtggtagtcactgagatgttgtcttgtgatgccagtataattcaatggatggttctggaatgacacagggttcttgaatggtacatgaagtcagcactgagttaggtaatagcaggtaattctgtaaatgatacataggattgctgtgctctagaagtaaagagcatgatgtgattacttatgatcagaatataggttctcaaagaagaattgaggcatttagggtttgggaaccattcttttgtaccaacatttatggaatgcctactctattgaggtaacatatctgatgaaagcccttcaggcctactacttaatttgagtcacttccccttttatttttcctatatatactgaactgagattgtaaacaaagaaaaaattgcctggcattccatccaagaaaatcacaatatgtgagaaggttctcttgcaacctcagagttctccaagttctgtagacaatccaagagtctaggggaatggctgcagctcagttttcctcttctggcattaggtacagagatggtaatcttgtcctcctgtattccctctgtatagaagtattaaaattgtaaattgcaagcattttccta

SEQ ID NO: 64794 - DNA, 3140 bp, Bovine  19866880505468
  misc_feature (1)..(1): n is a, c, g, or t
nggcacagcaacaggcagactctcggccgtagtgggaggggtggtggtgatgcaaggggctgagctgctcaatctgccccaggcccactcacctgccttgtgttcggactcccagaaccacccttcctgatagcccggggccagggaccacaaagcaacttctccctccctgcccctgccttctcccagtggttctggtctcggaccacatcgcacgagccagtgcaggatccctgctggggacacaaaggactgaaagcgacgggatctggggtgagtggcatcgatgcaaagcagctcagagttctgctcaatgatctcggaaatttcttgtccattcttccactttcagggtcttacacattcacgaaggcaacaggcttgtagtgggttgccaagcctctcatctattgcttcgtcctgttgccatagagtcctgacccttcttttccctgctccaacactgcctgcggctcctcactgtgcccgcaaccaattcctactcttaagccagacttgctacactctggatgctcccacttcttcaccttctctcatttcgctccctaagtcccacatacacggacagacttactccacctccaatgtcaccctgtctgtctggctcatgctgtctctccatctggaatgttctccatcattcaagcccgtttcaaaagcactttctcctgatccttctctatcctacgcctctggtttctggtctcacaacgcgcccacccgtcccagaagcaagcagcaccagggaaacagagagctaacaggtgctgcccaggcccacccctgcccgccgtcctcatctgccctccacatgaggcacaaacaaactcaaggcagcaggtgggtcagcagcggggccattaagctgagaaaacaccaagttacagctctgtctcctattcacagccaagtgtcctgacaagcaattcccaccttgtgggtgagtggcacctctataaaccctctgacagtttgggagacaaactccgccatcaatcagaatgtagccatcaggttcacttagagcctgcgcccctcgagccctgccaacccccctcccccaagtgcacacagctcagcagtcagcctcacatcttccggcttggccagaccctgcccagccctgccttgtgggtgagtgagaagcaaagccgagaatcctagcaccactcctcagcccagtatggctcccatggcaaacctgagaaaacgaggcactcccaaagtgccaggaaaagtccaggcttctccacacgtaaagcagcccagtggcccgggaagtctttatctctgcagtctcattgcctgccaggcctggaccaggtctctgtagtctggtggaacacagctattttggttcccagggcctgtgtgttttctcacgcccctaggcctttgtacttcctgttctctctgcctagaaaggtctccctcttggtctacagaacacattcccgctcattctgccagtctgactcttctcaatcatgccttttattcctggtacctgcacatagtagttgctctttaaatacttcctgaatgaacttgcttcaccattctctcaaacttcattgaactcatcctccgcttggcttgacactgaggacgttgtttcctgatctgattcccacgctcaaggtgctgagtacagatgagacttccctagataattctacaaaggggccccttccgtggtgcccacccaggctcctgtacactccaaagtcacatgtaggaccacgtattgtcactgctgctcaccagattaaaccctaagtctgtgatctaagcatcacccagcacagagctggccaagcccaccacagctgccacataacacccccgagcagtgatggctaaatgccaacggtgctgctgttaggtgctgggagccctgtgccagaggcaggtccaggcctgatcagctggtggcctgcagaaacctctctggccacaacctcacctctcagaccccatctctcaagtgggcaacaatctccttcttctccaaccacactgacaggatggagagcacgacacatcttgtttgccaaggaaaaggcctgcctttggccagagcagctgactctgaccctgatccccccctccagcagacagatgctgggagcctctccctacccctcaggtgttcagaacaggctgccactgccaatttcactcctgtgctgccccagccaactccaacctccttcccagcacattaaactttattttcttaatgaaatgtcacttgctgacttctggcagaatcataataaaaagaaacggccataaagccattttatgcagacagggcccccgccaaccggcccccctcccacacatactttgagaaggctccacagtcattttatgttctcagctgctggaatatcccaagccagtactcagaagcaagatggcacagagaacgccttcccaagcctctggctcctgctctgtgaagctccagagtaacaggcaagctgccacgcctgctgttactatccagagcagggactgccttcagaccccgcaagatgacccaaaacactcttcagtcaccggggagtccccttgttgtggctcagacccatgaagggctgggtgctgtccacaggcagactaaccctgatgatcagtgatgctcagcagtgggggcctggtctagggagggcaggcagttcaaaaaacacctcttccctccaagtggatacttagcaatagagagggagagggttaagttcataaatgataagcaaagcctaaattttataaaaatgacccatctctcataaactcatttcttcttgggtcatcgcaaagagagaaggaaaaaaaaatcagcgttaatttgatcaattgatcagatgatcgattgtgaaactggagatgcccactgactaggggcagtaacatcctggaacttgaaaccacaaaaaaggagccatcgatttcctcacctgctgttcccaacaaaaccaaagcccagggagaaaggcgtcctggggcctccagaggcccgtgctctccagaggaggggagaagcgggggtgcgcagcagcagcttccggagagttttacactggaattagttacagatgcagttacggtgt

SEQ ID NO: 64795 - DNA, 4874 bp, Bovine  19866880508188
  misc_feature (1)..(1): n is a, c, g, or t
ntggaaatcaaggacttagaatatcaggcaatcttaaggaaaaggaacaaagttggcagatttatagtacctgatttcaataccaactttataaagttaagataatcaagactttattaaatgtagtacagaaggagacaagacaaacagaccaatggaacaaagaagagagaagagaaatagcacacacatcatcagtcagctgattttcaactaaggcaccagagcaactcaatggggaaagcaaagtctttttaacaaatgatgcaagaacaactgaatattcatacagaaaaaagtaaacctttattcctataacacttttagatgtaaacacaaaagaatatctttttatgcttagggtaagcaaagatttcttaggatacaaaaaacaccaaccacaggggactctgctggcagttcagtggctaagactccatgcttccactgcagggggcacaggttcaactcctggttggggaactaagatccagcatgcctcgtggtatggcaaaaaaaaaaaaaaaaaagtactaaccataaaagaaaaaatcggtaatttggatttcatcaacatttaagacttttggccatcaaagtcaccattaagaatataaaaaggcaagccagagactggcagaaaatattcacaacacatatctgacaaaaggcttgtatctataatatacaaagaatttctataatctataataaaaactgaaaaaaaaaggcaaatgtcttgaatagacattccatgaagataaacaaatggtcaataatcacatgaaaatgtgatgagcatcattattatcagggacatgcaaattaaaaccgcaatgagatagtgttacgtaatacccactagaatggttaaaattaaaaagattgacagtaccaagtgttgatgaagatgtgaagcaaatgcaattcttatacactgctgacagaagtataaaatgtacaaccacttagaaaactatctggcatttctcaatacagtatattctacaaactataatgtaatttttttcaaactgtaatatttttacaaaaagatctgcagaacaatgttcataacagctttattcatatatctaaaattttgaaacaatgcaaatgaccatcaacagaaaaatgggtaaatagtggtattcttattcaatggaatactactcagcaataaataagaacaaactagttatactagtaataatatgaatttgaaaaatactatgttgaacaaaagaaaccaaaataaaattatatgatttcatttatatatagttcatgaacaagcaaaattaacatatggtgacagaaatcagaatagcagttgactttaaaggtgggggattaactaaagtgaagcacaaaggaactgtgagaggtgatggaaatgttctagatttggataatgataacctagtggctcagatggtaaagaatctacctgcaatgtgggagacctgggtttgatccctggattgggaagatcccctggaggagtgcatggcaacccactccagtattcttgcctggagaatccccatggacagaggatcctggcagactacagtcccatggggtcacaaagagttgaacacgttgagcaaccgagccacagcacaatctgagtgtatataactgtcaaaactcatcaaactatatactcaatatctattttactgtatataaacataaaatacatttatacacagtaaatgggcactgtgtatacacataccctggtggctcagtggtaaaagaatctgcctgccaatgcaggagactcaagagatgagggtttgattcctgggtggggaagatgccctggagtaggaaatggcaaccctctcctgcattcttgcctggacaagaataaaaaactggctacaatctacagggttgcaaagagttggactcaactgagcatgcatgcaaaggaagggaaaggccatgtaaatatctgcattaattttttgctctttggtgcacagataggcagaaagtattaatatatctgttttcaatcaccagaaatagtaggagaaattttgctccccaactcaaacaagatggcaacattatcagaatgaattttttccaaaggacatcaattttagaatagtcaacagtggatctttctcagtttatgtgccacaaaccatgggggagactgcatcctcatatccgtaggcttgcaatataattttttttaaatttttatttacttgctatatcatttttaaaataattttatttattatttatttatttttggctgtgctgggtcttcattgctacacggtcttttctctagttgcagcaagcgggggctactctctagttgaggtactcaggcttctcatcgtggtgacttctcttgctgtggagcatgggctctagtgcgtgggggcttcagcagctgtgatacgtgggctcagtagttgcggttcccagactctcgagcacaggctcaacgatgtggcgcctgggcttagttaccctgaggcatgtggaatcttcccagatcagagatcaaacctgtgtttcctgcattggaaggcagattctttaccactgagccaccaggggaagcccattcatgttagttgcttaattaaaggagactaaacttccaaatactatcatgtgaaggagccgaaattttttaaagtttcttcctatttctttccactcaatctctcatctgcagagtcagttggtggtctgatttctattactatacatgaaaatgaaagtgaaagttgctcagtcatgtccaactcttttgacaccccatggactatacagtccgtggaatctccaggccaaaatactggagtgggtatcctttcccttctccaggggatattcccaacccagggatggaacccagggtctccccacattgcacgagggttctttaccagctgagccaccagggaagcccaacagagggaagccacaaagcatcactgcccgccagtgttgtgggggtgactgttggctaagatgcttcaaatgcagtgtttatataaagaaaggtataaagaaaatatttctgtctgatgtgtgagacggctatttaatttcttcataaaggattaagttacttgtaggaggcaagtaggcttggcaacagagtatctgagtgatggttcaaggcatagcaggaaagaagctagaagaataaaattcgaagccatggggatagaaaaggtagagaagaaaggagcgagaaattgacagaagtagtgaccagattgtacagctgtcagttaattaagaatttgaagcctgtcgtcatatcatcatctactttgggaaattctggttatcttttgtcttattttaggtcaaagaagaaagagagaaacctaaaaaagcatattcaattttcattcacccataaaaatattgtttttgatatggtttaaatctgtttgcaaagtctcccatttcagtatttttaaaaagttcattaaaaggtgttgaggtaagcaaatctgatgtaaaactattacaaacccagcaccgtacactattttctagatttttgctaaaacaatgtctataaacaagaacctacagaatgaaggcctgccaaatatctataatctatatatatctatatatctataattgttacctccagaaacaatttgatatagcaaagtgccggaaaagaaaatggaactatttcctttaaacctcaacttaatttttaaaaaataaagtgctgaaactcttggaaatgaataacagttactttgagtttttaagggttgcatcttagaatgttttcaagaccaagcatggtcacttattgtcagttcaattcagttcagtcgctcaatagtgtccaactctttgcaactccatggactgcagcacaccaagcctccctgtccatcaccaactcccagagcctactcaagctcatgtccatcatgttggtgatgccatccaaccatctcatcctctgttgtccccttctcctgccttcaatcttttccagcaccagggtcttttccaatgagatggttcttcacatcaggtggccaaagtttggagcttcagcttcagcatcagtccttccaatgaatattcaggacagatttcctttaggatggactggttggatctccttgcagtccaagggactatcaagagtcttctccaacaccacagttcaaaagcatcaattctttggcgctcagctttcttcacagtccaactctcacatccatacatgactactggaaaaaccgtagtttgactagatgaacctttgttggtaaagtaatgtctctgctttttaatatgctgtctaggttgatcatagcttttcttccaaggagcaagcatcttttaatttgtggctgcagtcatcatctgcagtgattttggagcccaagaaaataaagtctctcactgtttccattgtttcaccatctatttgccacaaagtgatgggaccagatgccatgatcttagttttctgaatgttgagttttaaggcagctttttcactctcctcttttactttaatcaagaggctctttagttcttcttcactttctgccgtaagggtagtgtcatctgcgtatatgaggtaactgatatttctcccagcaattttgattccagcttgtgcttcatccagcccagcgtttctcatgatgtactctgaatataagttaaataagcagggtgacaatatatagccttgacgtactcctttcccgatttggaaccagtctgttgttccatgtctgtttctaactgttgcttcttgacctgcatacagatttctcaggaggcagttcaggtgggcctggtattcccatctctttaagaatttccatagt

SEQ ID NO: 64796 - DNA, 1627 bp, Bovine  19866880582650
  misc_feature (1)..(1): n is a, c, g, or t
nttcagccaggtatctcaactatggcaggtctgatgattccagtaccagtatcattagaatggtcagacataaaggtcaggagatagggaaacctgagggcgctagagcctcagtgctgtgttgaagaatggctcacctaagcactagagagactctcctgcccaaacataccttcactacgctgtaggctctcttttgagtcggggtgagcccttatcctctacagctcagttttaagaactgttccctgcctagttcactgagggatattccaagggtggggtgccaagaggtttctctgctgagattagaaagaaagtcaactgtcccttccttcaggtcaacttgacatttgagcctctgggatcctaacagtgaaaaagataggtaactctggccttttcatactttaggcataattcacagtgctagtataagcactgtgaacttggagaaatcctgcgtttcagtggaatggaaagaaggaggagatacaaagggcaaagaggtgggttctatgagtgtgcctctactacagttaaaaagacatgtgtggaaatggaacttgtgtcagctttgtcttccatcctgacttgtcctccccaatcttaaatacggtcctctttgaatgctttgggactctttttaaggcagccttgttctaaattgaagcaatcaacagtttctggtgtgtttgtagaaagcaaactgcacagaattctaaaaccttactcacccaagctagcttctgagtgcacactacctatgatactgatttggagagtaaaattgataatctgtttggggagacaaaagtatgtttctgaaacacccaaaaatagaaggcaactacagatggaataatgctagagcaggtcagagatggaaactcactgcagatgagcttgtgggggtggggccaaagacactgaggtggccctcatggggacgggtaaagaaactggctccaggcgcagaggaaggcttagtatgcttggcagcagcaaaaagactggaaaaggagactagaaggcctttgtctctggcactaagatgtttaagatcttattctgcagccagtgggagccttggaaggattttgagaagtaggagggatatccctaagacatttatgttttagaggcatgtggtgtagtgaagaggtcaccaggctgagtacgaaaacctggattctagagtctggccctgccactaaatgttctcgagcacatttctgctcctatgagaaattctcctcgtttatgaaatgaggatgataataatatctactcatagggttgtttgaggacttattcaacaaatccttttgtactggttccaaaatgccagccagtgtgtttggtgttggggatacataggtgagtaagacaaacctggacccacttcatgaagcttaatgagataacaaatgtaaagtgcttgcttagcgtagtgccttatggtagacacaggtttatttaggtggtgtatttgagaaatagaagaactggattctttatattatgtccttgaatcaagaggttcctaaaatccctttcagccatctattagcagttcctcggacttgtttttgttgttgtttagaaatacaattcttatgcgtct

SEQ ID NO: 64797 - DNA, 1913 bp, Bovine  19866880600140
  misc_feature (1)..(1): n is a, c, g, or t
nttcactggaaatgtgagaagcttttaaaacatttctcaagctgtctggaaaaggaaaaaaaaaatctttattgaaaggatgtagcagtcttttttactgtggcctatttatctctggggaaaaagctgtaacaagaagatcccctgccgaccatcagccgtgtcggggcctgcctggctttggtggcaggactttggtgtggggggcttgctgagagacagtggggccacctttggcaaaaaggggaaaggctgctggctctggtgcattcctgcagaagaggcagcctcagcacaacaccgaacgcggtgctcagggctcagcggacacaactcgacaaaccctgtttgaatgaatggatgactggaccaaccagcaaaccagaccaacagagccctgaagcggctgccccactttggccgacctaataaatgtgctccgtacctgtgacccctgagtattgtaagcagtgacacctgtgcgtccacacgtgttctttggcctcccacgagcctcctgctctctgaggctatggggtctctctgtctttctgtcactgtcatctgctgatgacatctctcttcagggtacttggctcgctctctccctgctcacccctgttcctgcctccatcttgggaatgtccacacccacatggaccatccatatcccggattctcgactccagtctccttcactcctctggcagaagtccataggagcatggtcacacttcccacctgaccatctcccagaatttcttcacctcagaaatcccaccttccaaccagaacttttatccttgcatctgttccacttccttcactcccacggaatctgctttttgaccttatttagaccttccatccttgggccgttgctaatttaacaagcccatcattcctctcctagcttcacttcctttcttacccaaccttgaccctttgattaatctcttgaaagaatttcttcgttcaattcccttacccctgtgcctttctgccccacctatctgcctttctcagctccagagccatatcccacttgctttctcctccacttctagcctgcaatgcttgactaagaaaatcacacaaccagtcctcctggtatcaacctagccaggccctgaacacataccaccagctccttggcttgtcccacgatgaggtctctctttcatttcccagagcagttgttttaagccttttcctccctctaaaaaaatgtccttccttgcctctgtttacctcattctccatagatgactttatttcttgctttacagagagaatagaggccaacaggctcaactttctcccctctgaccctctccttggccctggtggttaccttccctgcttcactcactgccagtcctcccacggtttgtgcccatcactcctgccccttgagatcttgcaccatctcttccgttgtgtgttggttttttatattcattttgtttttggcggtgttgggtcttaatcgcagctcgcaggatatttctttgtggcgcacaggctcttcattacgacgtgcagctttctctctagttgaggcatgtgggcttagttgccccacagcatgtgggatcttcccagaccaggaatcgaactttcattccctgcattggcaggcggattcttcatcactgggccactgggggaagttcctcttcccttgtactttaaaactccccgcttcctatcagtacctttccttccaccttcgagcaccctcaaatctcccctttaaaccttcttttcatgttaccttccaaacacattactgtccccatgttcctctttctttttactgataaacctgttgaaaagcaatcttattcttatcccctctacttcccaatttccaattcacccagctcattgtagaccatggtctgtcccca

SEQ ID NO: 64798 - DNA, 1264 bp, Bovine  19866880651147
  misc_feature (1)..(1): n is a, c, g, or t
nactttgatcttcataaggagctcttatatctttgtatcctcagaattcaatctgctatagcaaacaaaagcatcagtaaatactggcaatcttcttgttacctccttctccttgtttaaactgactcaaagattagaacatccaattttagatgtttagaaacagcatactttctgacagagctgactgtcctgtgtagaacttgtgactatttggagttaaggcagggatcacagaggtaacttggcagcttcctgaagcaatgaggtaggagacgaatctgctgcttccaaagaaaaggcagagatgtctgaaagcaaagaaatcagatgccattgtcctggacagcatggctagagggtgatatgccagatttataattttaaaatgcaggttcaacatttacagttataatatttttagctcattcacctttctacaataagttttcctcttcaggttaagaacaaacagaagaattctactcatctttcctatgcgaagctaaaaactaactgagaatgtgttaatttctgttaaatgagttctacataaaaatgctgattacatctctttcaggatttagatatctacaatttaattttaatctccaaatgtactgatattaatagagaaataacaaaggctttttattctctcaaatcaaacttttactttgaaataatttattattctgaatttataataaataacttcattctttttctttgtgtcagacacacatatgccacaggataaatgtatcactgccccatttcaagaccacagagtatgctcttacaattacattatgtattttctgcctgtaacttgaatattaattttaccctgaagtatatgacatagaaatagtgtccagtttacttagaaacctaaaagtttggaagaagatcagcagagggttatgaaagaggggcatttgtaacaacatgagaaacaaacaactatcaagtttaaacaaacaacaaaaaaaagaaactaaaatcagaattttatcatccccaaaaagtaacttcttttttttttttttttttgaagaaacaaaaagtaacttctaagattagacatgtttatttttcctattaattacacatgtgactttgaataagtcattccctctttgagcctcagtttcctcctttataagataaaagcctgcaccaactttaaagcccttcgtggcacaaaactctatgattaccagggtcaagctattatcaattctttatctagacccatgtt

SEQ ID NO: 64799 - DNA, 1525 bp, Bovine  19866880701814
  misc_feature (1)..(1): n is a, c, g, or t
ncttcaccattccctgatcttcttttacttcaccaaccttcacttccttgcaactttagacacagtcacaccctttccttgtcatttaactacagacctctgaaatctttcatgtgccagcagctatgctagatatgatcataaatccactgcctctgcactcaaaatccttacagagaaatagagatacatccaaggtagagtgttttcacaaaccaggaaatgaatggttcagaagggaaggcaccacatagtggagatgcttgattagggtatttagggtgagtagggaggagaagaaaggcatttgaggcagagaaaatagcatatactaaggtctagagctataaaacaatatggcttccaagtacaaatggagaaagatggaagataaaactggagaggtagacaagggtcaggtcatagagggccttatgggtttgaactttacaaaaataataaccactgtttatcaaacactcagtatgctttaactcattgaattctcacaataaccctatcgagtgtgcaatattatttacatatgacatgggagacatctccctttctcctttgagtatctccatttaactatttagtctcttttcctctcactctttttcccccatgccctatcctacaccagagtttttcacattcctcgttcttatatctttatgtctttgctcatgctgttctaacagcctggaatgccttccccttgatacactgcctgaaaaaactctattcattctttaagactcagttccagttcccctctgatggaacgtctcctgaaagccaggtgtcagtccccacctcctgggtgggaagatgctgtctctcccaaagaccttttggcaagttgtttttcccaagagcttctaaagagcagagccacatcggagaggaataaatgtttatgaacacagaattagaagtaatcggatttgaaatgaactcatttgcttccagttctcaaacaaccttttctttttcttttatagccaaacgagtgaatgtgatcgtggggaatgaccagttcctggagatctgagttctgagcaagtcagactccttccttttggcccccagaactacagatgttggctggcccacctgtttgactctgtatttatttcccaataaaagaagggctcccaaaggcattctggagacttatggagtagttgggctccgaggatacagtgtatgttcctgttggaaaaactgtcaagagccagcgtgtgggacaagataggacacgtggcctggctcttatacaccaaggttatcaggcaggggcagcagctgtccagtggtcaagctcccaggagggctactttccaactggctggcccagcctagcccttaaaagcatctcccacctgaaaggacttgagggtccatcagcccccaaccctaatcaggctttctagatctgtgggcctagttgctgccattgccacctctgcatgtgatgcgcctccctgcagctgccagtgtgggcagcctcagccccaga

SEQ ID NO: 64800 - DNA, 1748 bp, Bovine  19866880705637
  misc_feature (1)..(1): n is a, c, g, or t
ncaaggtgagaaacaggcagccaattggatccaggggggtggcccacccagccttctaggtttgtgatggttgtggttcccctctgcaacagttctggaaataagcaggtcaaagtttttgagagggataaagacacactgctctctgtccctgcttggtctcttcataagtctcctcatcagtctccttcaggtggtggccctgagactcaaagtaaagcttgccttgggttgaggagactggtaaccagctcatcagccactatgaggccatgtggtatgcatttgggctgcctgccaatagcacacgtatgtagacacagctttacagtttaaaaagggtcttctcataccagatctcagtggatccaactgtcctgtgcgagaggcaggccagcattattattcccattttacagataagaaaactgagatttatagaggtaaagacagggattccacacagaaggtagaatgacctggaatcccctagcccctgccacaccaggaaactgaatgaaaattaagtcctgggccttgtagtccctgagaaccccatcagcctaagcagttgagatggctcctgatcactatacctttcttctgatgcttgtagatttccagctgccgctgctgctgcaacctgagagtattgataatggccactgtgagtctgagggcctcttttgggtaaccatgggaacgcagggcatcaacccgagcacaggctgtaggcacatgctctatcagatgagaagaagatattttgattgagttaaattttcaaatcaggaaaatttgtgtttgacaaagggagactgtattcagttcaggtcctcaaatttgatctgacatctattgtgtaccagaaattgtattttatcttttagggataagtcacaggtactacctccaaggagatacactgcagcctcagcgtagtggtttggtgtagaaaggggcaaagaactaggataataaactgttatacctctttctgaacatgaacctcaggaacctaatgcagcaataaactacttttatagagggaaaggcctcacttgtttattaatcctgtttcctgagaacctattatgtgcaaggtagcacgctgggcaaatcaactacaaaaatgtataagaaacggtcactatcctcaaagagctcacaaataatacataaaaagatcattataaaccagttaaaaagaaatgacaagatagaaatatacacagaaagaaaatatttgaactgtgtgctttatagggcaagtaatattttaaataggtagaaaaatagaaacaggcatccctggcaaagagaacatctaaataaaggcatgtaagtaaaagcataaaaagtattctggataacatcttccgagtatggcaaatagttttgtgtagagttaggttatgtggctagagacagcctggaaaggtggagtctagaatgttaagctttgaatgccattctaagaagtttggatttaccttaggcataatgaatgactaccaaacacttataaatggggaagggattaaaaattataggaataattatagaaaatacagataaaatagaaaataaaaatcagagataaccattatttctaatttcatattttatgaaaaatatgtatctctagactttcctaattttaataaaaatgaagtattataattattgttttataattaggtttttccacttaataattcattttaaatatttttccataccattaa

SEQ ID NO: 64801 - DNA, 3361 bp, Bovine  19866880723380
  misc_feature (1)..(1): n is a, c, g, or t
ngttagcacaggcaagaaaggacttcaggggaagactgttgaggcaaccgtagcaatgtttgaactgggcggtagcaggtgggatggatgagaggagagtggacttgaagggtatgctgaagacggagactccagggcttcaagatcgactggaagagggctgaggggcaggaagaagcccaggctgccttagaagttccagctttgtggtgccagcggggatcaggagtgatgcccgaggcctctcttgcctgctcacagccagggctggtgcgtcaacgattctgaagcaggcactccatctcggggtaacatgatcctgtaacgcagggctcctctgatgtgggctgcttgccttttacagcattaggggagcaacatttcatggaaaattcaataaatccccctgtacagccagacgtctgtaaacaatggcttccaaattcaatcaggctggggacccgcagcagcatttatgagctctaacgtggaatattatataggggagtgagtagcagggggctgggggaagggacttcctggaagatgaaagctcccgtgtggttcctgctttccgatgcttagagtggagtgattctccaggtagaagtcctggctgtgggaactcctgggctgggcctgaggccattgagctgaggctgtgggcctggggagaaggatcggggactgggcctctgctactgactgtcacaaggctgaatggtcacagtcagcagggctgcgagggagccccgcaatgccccccacaacctgcaggagacgcccatctgagatgcctgtgagttgtcaccacgtgcttactgcctttgtcatatgggaaagccctatagcttcaaaccgcttgctataaactttccacctctttggtcctttggcctggtgatgatcttctgtcaggtccagactgcccttcacctagtgcagaacgaggtgggggcaaggacacggactagcattttgagaggtgttctgatgaggggctgcagcgggctctgttggggagccttcgcgctctcctccactctttaggcccctttagatttctccactcctctgcccttcgagcacctccagactctcctggaggtgagactctccagacctcctcctccaccgctgttgcctacgaaccgtctggcaggctttctccagcaaaccaaggtggggctttctggggcagaggaaacaaccaaggctctgggtcaaaatccattcttgtcatttaccagctatggatcttggataagttacttccttctctgaatctcagcatccttatctatctgggggaataacgttaaatgctttgtagggtgcctgtgaggatgaagttggacaatgactgtcaagtgcctggggttccagtgtgaaataagccagcaaaacatgcacactagcttccttctccacatttctcctcctcctcctctcaaaccttcctgtaagaaaggttttggtgaatcactgggagctgccctccctccaaccaaatgtaccagatgttccatcagctctttgctggtgtcctgaacatctcccaggctctctttgtgattcttgtgcatgcctgataaaagagtccaacaggaagagcatcagacatcacaaaaggccctggccaccctgagaggcacaggtaagaggtggaggcacctctggggtgccttgacactgcaatgcctttcttatagacagaatgtaagtttcaggaggacaggagtttccacctgctttgtttatggccctattcccagtgcctggagctgggcttgacatttggtaagtgttcattaagtacttcttaaatgaattaattacttcagctcctctcaccactttcctctggtttttctctggtcccagggggagaacagagagtctgccttccagaagaacaaaccacaaaccctcctgaaagtcaggaatcctctcttccctctaaatgtccttggaatgctggccaggcttctccccatggagcgagtatggagcagagtcaccaccagaaaggattctccttgccacccactgctggaaacccgggtttggggagaaggaggggaagagggtgatttttgcagaagaggttttgtggagatcctaggctggatgcagacctttggagatggtgcaattctaagttttgtgaacgtgaactggatacacactcccctcccttttcagaagactgttctatagcctccccccactccttcaccctgccccagtcaatttaagacacagggcaaaagggagaaaaaggctggctacccccagaacaaccttaagtagcattttaaaggattaatcacacatcaggctctgcgctcagaacttcaggcatcaactcacatcagcctatgaggaagggacagtgttatccccattttatctataaggaactcgaggcttagagaggttaaataacatgccaagatcacagagccgagaagagggacaggatgacgtcccaggtctgagcgatgaacctgctgttgcttcggaaaaaggtgatggagggcaggcctggacttgaaggtttctggggccctggcagagaccaagcattctccatctgcccccgctctgtcctttacccccacctcctccagttcacagagggcaactgaggtcgtttgggagaagctatttcctttgggccccttgacttcctgctgctaggccctccctagggaagcgaaaggaggtgggatggggttcagggagagctactggagagctgctgctccctggtccctgctacagatacgagtgggatgctcagccgggaccagttccaatcaactgggcatacttgcaagaccctgttggtagtttcgggtttgaggccaccacttgctccactgcttccaactgctcagtaatcctatccaactggagggaggagaccctttaggatctgagccagcattgagcttttggttgtccatttggctggaggcggggaggggatccaaggagacagatcccaggggtgagatctatctctccacagccagacacccagcttccagggctctgggatttattccctaggcagtcacacaaaacgcctgtttccccaccccgccccccccacccgcaaataactgacagatgatggcatgtccccagcacaccccagcgacatccccacggacacgcacactctgcctccacgtggacttcggtgactagagggctctgtgcgcctgctctctctctctctcaactccccccagcctgcgcgctctcattctccctgctagctgctgtaaggatcagtccccaaagaaaaatgcccaatttgtcatgtcatgtccagctgttaacctcccgt

SEQ ID NO: 64802 - DNA, 1540 bp, Bovine  19866880748175
  misc_feature (1)..(1): n is a, c, g, or t
ntcacatcaggtggccaaagtaatggagtttcagcttcagtatcagtccttccaatgaatactcaggactgatttcctttaggatggactggtttgctgtccttgcagtccaagggactatcaagagtcttctccaacatcacagttcaaaagcatcaattcttcagcgctcagctttatggtctaactctcacaaccatacatgactactgggaaaagcatagctttgactagatggacctttgttggcaaagtaacgtctctggtttttaatatgctgtctaggttggtcatagcttttctttcaaggagcaaatgtcttttaatttcacaactgcagtcaccatctgtagtgattttggatcccaaaaaagtaaagtctgtcactgttttcattgtttccccatctatttgccatgaagtaataggactgggtgccatgatcttagttcattgaatgctgagttttaagctagctttttcactctcctctttcaccttcatcaagaggctttttagttctttgctttctgccataagggtggtgttatttgcatatctgagttattgatatttctccctgcaatcttgattccagcttgtgcttcatccagtcccttggactgcaagatcaacagtcaatcctaaaggaaatcatacccaaatattcattggaaggactgatgctgaaggtggaactacaatactttggctacctgatgtgaagaactgactcattggaaaataccctgatgctgggaaagattgaaggcaggaggaaaaacggatgacagaggatgagatggctggatggcatcaccgacttgatggacatgagtttgagcaagctctgggagtttgtgatggacagggaagcctggagtgctacagtccatgaggtggcaaagagccagacgtgactgaactgaactgacttattgttaacttaaggttctgattgttaacttaagataagaaccaataagatgaaaaatcagttggaactattgggaatgaaaaatttaatagttgaaatccatacatggattgaatagcagaatagttatagccaaaatgaaatgatgagcaataagatcagggtgatgattcatccaaaaggcattaggaagggataaagaaaacaagaaagatagaaaacaaatgagctcattgtctgtgacatacattggtggtaatcccacagtcattcccagcccccttctcccttactcctctccacattggagattgaaaaagaagggaacgcaatgaggatcctttccttgttatatctcctcccctttttaacttgccttgtatgtggatgttttgtctggagctgtgacagctttcttgtgatcatgaggtaggttgctagtcatcaattcaaaaaaactcatcatactcaggacaaccaagtaggaaggcaggaagagcccaagaaggttcttggtggctgaacagttgaactaatgccagcaaccacctaccaatcagattcctcgctatgcaagtacaaacaaagcaaaacgaaactcca

SEQ ID NO: 64803 - DNA, 1192 bp, Bovine  19866880864138
  misc_feature (1)..(1): n is a, c, g, or t
nccaggaatgcaaactcatttagagactgtggagcaagaggaagaggatgaccagggtgagcagtagggctccctggacgcaacctgctccggtctgctctgctcagcttccctccacccaagtagttttcaagcattcagtacaggtaggtcaagtgagctagctacaatgcatgaagccagaagtgtggtgagcccagtttacttaagggaaaaaaaaacttttcatatcttaccttggcaaacattgaattgagttgctttccagagccatagtaaccaccctgggagagaaagagcttcacttgttctttcacctgttcttcatccaaatgccaacagttctcatcatcaatgctggccccagctgttgggtcaggagcacctgcgaggaatagggtggtgaaatgaatctcctgagttcctacactccacactcagcaggagcagccctctgtgagtatattcagaaacagacaggcattctgccttaatctgggctttgtcaattgtgtggctctcaataaacataagagagtagagctagtttcatgttcactgaagtctcagttgtatcctctcccaaggtctacgaatatcatcctggggtaaaaatgcacaaacacaaaaatagtgatgtattttttttcccctaggagaatgtaatttttcttctattttgtttttctttgaagtttaaaataagcctaaagcacacatattattttaaaattaaaaaaatactttcttagaaaataaaaatttctctttttaaaattcactataaaattgtagcttctcaagtggagtcaacaattctaaatttctggaaacttgcaacccagagcacaggcagggttgtatacagggtgatgttttataaatttatactcagaatatctttccttcctgggctcacctcaatgacatcacttaaaacacagtgttagttatttacacatccctctcccctagtagcctgttagctccttgctcacagttgaatcatttataacacagttctggtaatgtgacaggcacctaagaaatatctgtggaatgaaaactgaatcttcttctctcactttctcaaagactgagtcctgtgataagtttttagaaccctgtctccaagtgacaaaagactataagtcagtatagtcttatagtataagtcaatactctatatgtg

SEQ ID NO: 64804 - DNA, 1132 bp, Bovine  19866880882080
  misc_feature (1)..(1): n is a, c, g, or t
nccttaggaggtagttggcccagttgtttagtcccagtccctgtccatgcttctgagaaatcccaaacaacttggaggctcgagaccccatctagtgcccaaagccccagcacaaaactctgcgctgagaggcttcacttcagctagaaaacccaggggcagatctgagactcctgccttggagcaggcaaaccacaggctctgttgcttcatccttgtgaggggctaagagcacctgcagaaactttcaagcctctgacctgggggaaagaagggatgggaagagacctcaaatggggtctggccaccggggttgcccccctagccctggttactgcagatcatctcagggctgctgaggagggagagcttgtccctgctggccaagttctcaccccaaatggtaatctgagtagacctggatcaggaccgggaggcccatggctgagcacaggctctccttgacaggtgtgcgggccctggtgagcatcttgcagagctggtacacactcttcacccccaccgaggctaccagtattgtggctgctacagccgtctcccacaccaccatcctgcgcctcagtcttgactatccacagcgggaggagctggccagctgtgctcgcaccctggccctgcagtgcgctatgaaggatccgcagagctgtgccctgtcggcccttaccctctgtgagaaggaccacatcgccttcgaagcagcctatcagatcgccatcgatgctgcggctggcggcatgactcactcacagctgttcaccatcgcccgctacatggagctccgtggctacccgctacgtgccttcaagctggcctcactggccatgagccatctcaacctggcctacaaccaggacacccacccggccatcaacgatgtgctctgggcctgcgccctcagccactccctgggcaagaatgagctggcggccctgatccccctggtggtgaagagcgtgcactgcgccacagtgctttcagacatccttcggcgctgcacggtgactgctcctggactggccggcatcccaggccgccgcagctcaggaaagctcatgtccaccgacaaggctcccctgcgccagctgctggatgccaccatcaatgcctacat

SEQ ID NO: 64805 - DNA, 1069 bp, Bovine  19866880914534
  misc_feature (1)..(1): n is a, c, g, or t
ntgtgaagagttgactcattggaaaagactctgatgctgggagggattggggggcaggaggagaaggggacgacagaggatgagatggctggatggcatcattgactcgatggacgtgagtctgagtgaactccgggagttggtgatggacagggaggcctggcctgctgcaattcagggggtcgccgggagtcggacatgactgagcgactgaacaacttctgtacgtggtttgtttgtttttgcctcctctcttcccacattggcctttcctctcatttggtttataattactgggagaaactggataatgatcaccagtgccctgagaaactggataatgatcaccagttactcctgaggagtaaccaccaggagcaagtctaaatgactcaagagtcctgtcagcagccaggctggggagggatcattttcccaaacattttaatcacactgctcctaggatgggaagcctgacaggatagctaacagattcttaaagattcagctggttgtactgagactcactgggagcagggaagctccagaaggttgaaggaatagcgtttcgggctcgataggatggatggtggcttaaaggagagtagtagcaatgggggtaagtggtagtagcaatgggaatggagtggggagattgatcaggtagaaacttcggaacttgggtctggaagacactgaaatagacaacaggattgagtatccaagtacacaggacaatacggcgacacatgaggtgcgcttagtccagaacttacggcgaaggctggtcgagggcggggctgaaggtggtgggaagctctgtccgctggttcggccgaagctcctccgcccggatcgcccccgggcttccctgggccacaccgccatggctggcccgggtccgggcgcggcgctagagtccccgcgacagctgctgggccgtgtacgctttctggcggaggcagcgaagagcctccgggccgggcggccgctgccggcggcgctagcttttgtgccccgcgaggtgctctacaagctttacaaggacccggcgggaccgtcgcgcgtg

SEQ ID NO: 64806 - DNA, 1311 bp, Bovine  19866880928318
  misc_feature (1)..(1): n is a, c, g, or t
ntgttgggtgagtgtcccaggttgcaggggggacccctcctccagggtcaccggtgcactggccctggggatctatggatactggaggccccaggacaggggcggggcatgaccaacagccctgtgagatggctaatgtggagatggtccttgtgtgtatcacagaaatgcactcaagccaagttttccccatttaaaaatctcttaaaccctcatcacgtcttacacttctgtccccttcactgtctcgctgctcgaaggtttatttatacttaaccagctcacttcccacccctggctcactgctgccatcatcctacttccccattgaatccattctcttaaaggtcattaatctgaatccccaagtctatcttagtcctctcccttcccagcatctcttcagctaacctgctggccacctcttggacaccctcctctctctccagtaccatgtgcctaattctccttacagacatctccttctctggctctttgccctcctcccaccggaaataaaagtaggtgttttctagtgttctgtctttgaccctcttctccccgtgcacactttaatctgatgatctcatctgtccctgcagctgcagctttcatctttatttagaggactcctgaatatgaagctccaaatctgacctctcgctgctctgatcccatttttccaactgcctggtgaatatcttcagtgctctgtcccacagacattgcgaaattgaatccatcatctagcccccaccccatcataattcaccttcagtggtccttatttctgttgatgacatgatcatcctttcaattacccagtcatgaaatcttgaagtgatctttgctgtagatgctctggactcataaaaccactacatcctgtgtatctccaccttgatggtcaaacctgtcttttaacagccattattatgctttaacacacacacacacacatacacatcttcttctcttttctttatttctcagtgtgaacaccatcactcttcttccaggctcctaaaccagaaacctaggcatccttgttagattcctgatcatcccttttatatgtccccttgtccctagttcctgctactgacttcgttgaggtccccagatgtctcacttatattatctaaaaatcctcccaattggtgttcaccatccagtcttctaccacccatcctccaccccactgctagcgtgatcgtgctaaaatgtcactccagtacctgcctacaactcaccaaggactctgattgctcctaggataacatcccagctccctaaggccgccaagcgtct

SEQ ID NO: 64807 - DNA, 4515 bp, Bovine  19866880934384
  misc_feature (1)..(1): n is a, c, g, or t
nctgctttcagaccactgcttctccacccagtggaccctgagggcaggtaccaccccgcacccctcatggttcttatctgccttctccacatctgcctaggactttgacactcacctgttacccaagtgacacctgccctgatcttgtcagctcctgttgttttttccagtattccacatcctcctggaggaccttgccaacaaccaaaattgttctgtgaaagaactccctcgcccccaggcctctcatggccttggacccgcccatcacactctctctctcctcctcatatctccccagacctattctctctctctcctcctcctatctccccagaccacttactcatggcttctagcctggaccccagggtgcgtcacttcaacaccctcttgccaacatactcaacctccttgttgcctctgccttctccacaacccagctattctcctctctgtctcagacacacaggcggctaaacgcagctggggagaatcacaaaaccacgcagagatgtgccaataaaaattcacagtttccaatctcagcactgctaagcaatccttttccatgcccttggtcagctctgtctctccttttccacagagacaatccaataatattttattattttgagtccccctccccaccttctgtccctctgtcttactaggtggtcttactgcctatttcactcagaaatttgaagtccttaggcatgaattctctccttccagacccaaaattcctttcagtttcagtgcaagaggtattcaccctcctgtttttgcttaatctcttctcctggacttagaatcccattccctggggaagctgtcctgttctcccttctctcgtgcatcttcccccttcccttctcatgcttccctccatcagcacatataccctgtctcccccattacaacaataccaacagcatcctcccatctcttccatatggaagctaatgccctttctttccactttccttttcacctaagatgctccgacgctcctttctctcccaaacacttctgaactcatggcagtctggttttcacccctaccaccctactctcaatcaatctgttctcagtcagataaatccttgatggtcatcatttgccaaatatgatggaactgcagctatatccattcattaatttgataaacatgtattgtcttccatgtgttaggcattacaccaaggcctaaggaaaccatgagctctgtgtctttatggagcttgcaaggtggaagtatgcaataaactaattacacaaatactgtaacacggaagttgtgtcaaagagaggtgaacagggtcacgtgagcctataaaatggagatttgccctgctcagaggaattcagaaaggtttctctgaggacctgacacaagctgagttgtgatggataagtaggagttgaatggatgaggagggaggggaagtgataacactgatcagatgcttactctgtgccaagcactgtagtattcctcccttcccttcattttataaatgaggacagagaggtgtaagaagttctgtaacttgccatgggtacctggtaagaggtggtgctggactttccactcaggcagtgccatagtggagcccatgctctccaccactctccttcccctgatgttagctatcatcctcaccatcatctgcttctctccctgcactctctgcgtgatcgctactgtggtttaatttcctccattcgtacctccagtcctgacctgtatatatcagtgtggaccaggttctctacttggatgtcccacaggctcttcagcctccatgtgccctgaaacgagactgatcttcctctagacccgctctcctcctgctttttcaatttcagggtatgacaccaccatccgcagaactccctcaatcggcagtctagactcttactcttaactcaggctcctacatgcaataaatcaacatcgtagctgttttcacctcctaagtaccctcaaaccatcttcttttctccattgccctcgttcagatatcatcatctccagtctactcttatgtttcctaatgcatctctctcccctctaatccatttctatctctacagctagaaggatattcctaaaacacaaatcagatcctatcattcagctacttaagatccttcagtggctctcaaagtccacagcataaatcctgaactccttatcagacagtctctctccagtctcatatcccctccagcaacgctgtgtgctatggctgggcaagacctagctctccacttattattctcactgccaataatgcccacaacatccgtctccccatgggcaacctgtaactcctattaagatcacactcagacaatacgtccttgccggaagctttccctgatagggaattcctcttcttcatggtatatttcttatatgtctacacctctattgagagttggactatacagaaagctgagtactgaagaattgatgcttttgaactgtggtgttggagaagactcttgagagtcccttggactgcaaggagatccaaccagtccatcctaaaggaaatcagtcctgggtgttcattggaagaactgatgttgaagctaaaactccaatactttggccacttggtcacttcactttggtcagtgaggagctgactcatttgaaaagaccctgattctgggaaagatcgggggcaggaggggaaggggatgacagaggatgagatggttggatggcatcaccgactcaatggacatgagtttgagtaaactctgggagttggtgatggacagggaggcctggagtgctgtggttcatggggttgcaaagagtcggacacaactgagcgactgaactgaactgaacacctctattatggcacacatcgggtaatattgcgattgtctgtttattcagtctcccctggtagaccttgagctttttgagggcagggaaattatctacatcctggtatactcaggaccctgaagagggtctggtacagagtggtaatgactgttgaatgattcaatgaccaagttaatgcaggaggacttgaagggacagcagggggatgtccggaggggaggaaaagatggggtgggtgggggtgagagaggatgaaagaggggagggaaggcaatcgaggtgatgttgaagattcgttctgcttaaataaagcctggcttcatggtcaaagagaagcagaagctgcaagggtttcagaaggcagaggctccataactgctgtcccagaaaaatactaagtgtttgtagacctagtgggaagagggtaggcagtagctacacaaaccagccagctagggaaatcccatgtctagaaacaccgacagacagacacccccaccgggacaggcagatacctggtgcttccccatcacagagccctctgcagcccctgtgctggcccaccacccgacccggaaccctgctgctctctctctctcagcaatttccctacccaagaaagctctaagggtttcaattaccggcgcgtgggatttagtgccctgggctctctgactggaggagatttatttgaaggtttagtgtcgtggagaattcacgtcttcactcccaggagcccagcttccgtcctgagcccctaaatcaggaaccaagatgggctattgtcacttaccgcattatcctcgttagcggaccaggaggggtgattaatagcaatgcacacacagccatcttgctcgctggccgctctgccgctgtgcgtgacctggggaggggctgagcccgctccaggataactaaggagactgggctagagcccccgcctcagccaggcagggcagcccctgtggtccttctagaactggggacagttcaaagcaaacttcgccagagagagcccagctggaaacctctgggcctgactcatggaagaggacagagggtgggtgggtgtcagggagagagaaaggggtgggtatgtttattatatgggcttctctggtggctcagacggtaaagaatccacctgcaatgtgggaggcctgggttcgatccctgggttgggaagatccctggaggaggccatggcaacccactccagtattcttgcctggagagtccccagtgaacagaggactcgggctacagtccatggggtcacaaagagctggacttgactgagagactaagcacagcacacatgtttatttcagttcccaagtgctctttgagtgcttgtgacgggggccagtgtgcgtgggacacaagggcacacggagagagggaggtgtagggagaggggtgaatggtgcagtttctatgagagtgggagtgagacagaggggtgtatctctgtcacgagacagagaggaatatatgtgcgagagggaatgtgcttctaaggagagagacggtgggagagagaagagtggttgtatgttttcttctttcttttgtctccgcaaattctcccctccatacaccttcccctcaaactttttggagtcaggctcaat

SEQ ID NO: 64808 - DNA, 707 bp, Bovine  19866881010415
  misc_feature (1)..(1): n is a, c, g, or t
ntcttttttttgtttttttttggtttctgtttacggtcttcctgtggaaattgtttacttaacactttttagaaatcaattttatttataatcttttgagtttatcttttggcaaagcctttttagtggtttctttgggtgttgccttgtatatctaatttttcacagtcaactgatgttgacattcaccagtttaagtgaaatatagaaactttgtctccctttacatccttttgtcctccccccatttataatataattgctttaaatattttttcgacatccatttagaaccacatgagacagtgttataatttttgtttcagttatcacacctaatttagagaactcaaagaggataagaaaaatgtattatatttacccctatttttgcttgctgtgctttttcttccattttgatgttccaaaggtttttcttttgttgcttcttttccatttagagaacttcctttagccattctttaggttgggtgcaagcaacgtggtcttaggttatcttcagttgacaacgtcttgatttcctattcatctctgaaggatgttttcattcggtgtaggattctgggttgagttcttttctttcagcactttgcttctggcctttggtgtctggtggagacaatcagaaatccactgtcatttgaattgtttctctcatctgaaagttggcgtttctctttttgcgg

SEQ ID NO: 64809 - DNA, 1012 bp, Bovine  19866881012182
  misc_feature (1)..(1): n is a, c, g, or t
naccgctatggccgcgcccgtccgccgtctgtgtcatatcgccttccacgtgccggcggggctacccctcgcccgggatctgcagcgcctctttggctttcagcctttggcagtacgggaagcagacggctggaggcaactggctctgcgcagcggcgacgctgtctttttggtgaatgagggcgcggggcccggagagccactgtatggcctggacccgcatcatgggatacccagcgccacaaacctgtgcttcgacgtggccgacgcgggcgctgccgcccgggggctggcagcgctgggctgcagcgtgccggtgccccctgtcagcgtgcgagatgagcagggcgctgccacctatgccgtggtaagctcgccggcaggcaacctcagcctgactctgctggagcgcactggtttcggtgggcccttcctgcctggctttagccctgtgccctccacacccggcccgggctggttcagccacgtcgatcacctgaccttggcctgcaaccccagcagctccccaaaactgctgcactggttccacgactgtctaggctttcaccacctgccactgagcccaggtgaggatccagagctggggctggaggtggcagcagggtctgggcttggcgggctgaggctcaccgccctgcagggccctgtcggcagcgctgtccccacccttgtgctggcagagtccctgccaagggccaccagcggacaggaccaggtgggagcagtttctggcccggaacaggggacctggattgcagcatgtggggctgtacacacccagtatcaaggaagccactgaaggggtggcaggggcttgggggtcagcttctgactcctcctaaggcctactaccagcagccaggcaaggaggagcagatcctggctgcagggcaggagcctaacctgctggcccacaggggggtattgctagatggtgacagaggcaagtttctgcttcaggtcttcaccaagtccctgtttgcggaggaca

SEQ ID NO: 64810 - DNA, 750 bp, Bovine  19866881015706
  misc_feature (1)..(1): n is a, c, g, or t
nacatgtgtttttaataatttgtaagtaaacgtgtttgtgccaaatatttaataagaaaatcatgtggcttttctccaatgttagttgttttcttttgaatactagtcgaggttttttactggaaggataatgaaaatattaaaacaagcttctaaacgatgtcttttaaaaattgaataaaatattcacacattcatcttggaaaaagacaggaacttaagtcaaaacctcaaggatcatggccacatctctatttctgggactacagatgaagagaaatgggttcacattcttgattattttgctgatggtgtggaaagtcttgaaatgcgttctgtttatctacattaggatccccactgctactaaccagctgaaactcctcaagtactcctctaaactttctagtgggtaaaagctatgctgccaatttctgatcttttcagggcttctgcagtacaaatcaggtgctcagctttctttatggctggtttagaattcagctttcttaggtatgctaagtctgttaccactatccttctttacagcttccaaaatttagttactttcttctcctggtctttgtccttgggtttgtagggaaagagtaaattagccaagatagcagtggtcaggcgctctcaccccacgttctcttgctctcaccccatgttttgtaaataatgactttgcatggttactaacagctgagatcctttgtagcactgcatgcacctatcaagcccttg

SEQ ID NO: 64811 - DNA, 781 bp, Bovine  19866881063690
  misc_feature (1)..(1): n is a, c, g, or t
ntgctggggcatgaagttaagggtagaatacagaggtttgtctctttgcgggaaagatgccagccctgcacttccctcttctcgtctaggtgttccgcatgtatgagggccaacagcctggcacctgcaaggtgagtctcttggccctcacccagccatctctccccagggccaaatctacaggttttcagtgagttaagtgatgcatgtttgggtgaacagtctccatgacagttcactggggcgagaggaatagttcttgacctgaagaccttacaggtagagaggggacaggagcaaatgatggagacagtagtgtcacagtgtgtgaaatgtactcagttttgtgggatatgaagtggggagctatcgtatctatctggaagaatcaggaatggatgcttggaagaagcagctggtaatctaggtcctagaactaaattattttctccaggtttggaaggagaatcagcagtaaagatgttctttcctggcccaagagtagtgtgagccaaggtgaaataccatacagcctgtgagctgttggattagttggagttagcaggactggcccaggacagttaaggccgtgagcactaggccctgaaggattttaggcggagagaggagtcagatttgcctgtcaggaagactacctcaggctgccttttaaagaattgattgattgaagagttagatactggaaacaggatggaagctttacagtattaaggctagaatctgagctagatcagtggtacggggagggccgaggtggaag

SEQ ID NO: 64812 - DNA, 1331 bp, Bovine  19866881090790
  misc_feature (1)..(1): n is a, c, g, or t
naatagggagaggactgactggtgtcagacaagtgactggcccctgttcccagggtggagatctgcccagtgtggaagaggtggaggtgcctgtgcccccactcctactgcagtgggtcaagaccgatcaggccctactcatgctctttagtgatggcaccattcaggtaagagctccgcctggagttgggggtgaggactgggaggtccagggtgctggggaggaaacgatgtgggccctaggccctgatcagtgccgccctcctgtgcacaggtgaacttctacggagaccacaccaagctgatcctcagtggctgggagcccctccttgtgactttcgtggcccgcaatcgcagtgcttgtacttacctcgcttcccaccttcagcagctgggctgctccccagatctgcggcagcggcttcactatgctctgcgcctgctccgggaccgctgcccggtctaggccagagtctgcaggcccggccacctctcaagccctcaggcctgaggtctgtgcctctcaggctctggccctcgcctttgtggccctccctgttcctttggtgcctcactgggggctccgggccgaatcccccagggaatcagggaccagctttactggggttggaggcggcctcccaccccttctccaagaaaagcctgagccttagccccccactagggggcgttatttatggaccacttttatttattgacatttatttattgggatgtgagccccacgaagggcctccttctgggataataaaccgtttttgcagaactcgagggcctcctcactcgcagtagagtccgtggaccgtggccacggcgaagagcgaggcgttggtgacggcagccgaggccaacccgtcgcacgcggcgtcccagagcgcgcggctgaccacgcggacgccctggcccgcgcgctgccccagcaccacgctgcacaccagcttgtagcgcggcgggctgagctcgcgcaggcgcctgcgcaccagctcgcacagctcctgcgccagccgcccggcctccgcgcctgagtagcatgcgtcccgcagtccctcggccaacgctgcctccagggcctgctgtgcgcgcgcagtctcccagcgctcccccggcgctggctccgtgcggtacgagggtgccatccggcgggcgggtgccaggggcaagccagagaagctgactcgcgagcctagagggggcacggggcccagggatgggcgtagacccccagggcctgcacttggcccagccagtgagttgcggtgtgaaaaggacaagaccggacctagcacggagccacggcgggaggccgggcc

SEQ ID NO: 64813 - DNA, 973 bp, Bovine  19866881126857
  misc_feature (1)..(1): n is a, c, g, or t
ntgaccccatggactgtagcccaccaggctcttctgtcctggaattttcccaggcaggaatactggagcagattgccatttcctactccaggggatcttcccaacccagggatcgaacctgcctctcttgagtcttctgcatggagcaggcagattctttactgcacaacctgggaagggctaccactgcggggcggggtaataattattaactccattttacagacgaggaaactgagatacagaggggttaagtgacttctctaaggttgcacagcccgtaaagtggtaaagaaaaggggtcaaaaccaagcaatctgactcgagagcccacacttttaaccactccccttcccctcaacaacacacacacccaggactagcctagaacagagaggggaagcaacatccttctgcagttgagttccacaccttggctatgcaggagtgcttctgggtggaggacttcccaacagaaattgagaacagaggcagagatgaagggacacccgccccgccccgcgcaagggtctggagagtgggggcccgagctctttctgcctcctcactgggggccacaccacagcctagcccctgtggccccatccacgcactgcccagggcatccacttgtgcccacataagtgttccacccgctcccgtgaccctccggcaatccctcctgccccacagcctctcagagggtcccctactttcacatctttggctccggtccatttctccgctccccgccccccagccttcacgggtgccccagccctcaccgttagctcacgcgtcccccacttctgtgccccttgtgcccaggcccagcccagcaccccctaactcctggtacgtttcccccctcctcaacccggtgtctgacagccggacagcgggatctgcacagcaagtgaaattcccgtcggatcgataaagccgaagcgctggcggcgacgggtcgatggtt

SEQ ID NO: 64814 - DNA, 948 bp, Bovine  19866881193748
  misc_feature (1)..(1): n is a, c, g, or t
naattagttacagaaggaaaggataactatgcaagaggtcttacaattgaacaatttaagaagccatttagaaattattccattcttgaggcaagaattctacacattcgtacaggtactaaaaatcactggaagatttttctcaatttcacttttttgatgacataacatgtttactgtttgcttcctttcctccctattcaatcattcagccaatacctataaaagtgtcttctaaatatgagatactgttgggagattaggagtatacatctgagtaagacaccatgtttgccattatataataaccagcaagtgattttacaaagcactttcacagttacctcatttgaactttgcaagatcttgaaacattcttgtcattgttttctaccgaatgaagaaaccaagcccaaagaatttaactaacttgcctttggctattcaatggatctgtgatagggatctgaacccaagtcttcggaccctgaagtctgggttcctcctttactctaggagcttacactgctgcaagaaaactaaagcaaaaataactttaatacatggtgaaatgtgtaataagagaggtaccaaaaaaaaaaaaaaactgtaaaagaagaacaacggagggaaaaattttgactacctaaaggagagatagggagctgtagcaatggtaagaaaacaatcaggaaaggttttatgcagaaaataagtggtctttgagccaagtcttgaagagggggaagatttccataggataaagggtaagagtattctgggttgaagaaataatacaaataaggaggcaggaaaacacacactgcatttagtaaacacataaagcctactttgcctgaattatagagtacttgttaaagaggaagagaactagaagaaaacaggcaggtatgatgcaagagcagagaggactagataccaggctaa

SEQ ID NO: 64815 - DNA, 1181 bp, Bovine  19866881228333
  misc_feature (1)..(1): n is a, c, g, or t
ntttttccaaaaagaagacatacaaatggccaacagatttatgaaaggtacccaacgtcactaatcatcagaaaaatgcaaatcaaaactgcagtgagataccacctcacacctgttgggatagctattatcataaaagacaaaaaataacaagtgctgtggaggttgtaaataaaaaggaatccttatgtactgttggtaggaatataaatttatatagctcttaccaaaccagattcatctgttggatgtgcagcaagctaaatgcagaatcttccaagatttgcagcagaggaaaggtttatccacaaggcaactgagccagaagacaaaagaccaaatctcaaacccacctctttcaaggctggggctcagggtatgtatgagagaaagctaaggtgtggaggttatgggaaaaggtgattgaagataagaaaaaggtgagataatcagcagtcctcctgcttctcgggtggctcagaagttaaaacatctgcctgcaatgtgggacacctgggtttgatccctgggtcaagaagataccctggagaaggaaatggcaactcactcagtattcttgcctggagaatcccatggatggaggagcctggtgggctacagtccacagggtagcaaagagttggacatgactgagcaacttcattttcacttttcttttcacagggcaacagatgcacctaggttacaagcttcttcataggatgaaaatgtggtgttagcatgttctgagggtggagttttcggttctttgacatcagaaggtcaccaatcagacactcatgcatgcccagttgaaaggttgatggtctcaacaagtcttaactagcccaaatccaaactagacacagctgactccaagttcctgaaaaacaacttgggcaaataccttattgttaaagcttggagaacatgcaagtttttgttaaaataattaaagagagcttgatcagcaaaggcagattatagttcattctttcttcagcaagttatagtttaatggatctaactactgatgactacccttagtagtcactatggaaatcaggatgaagcgtcctcaaaaaaaaaaaaaaaaaaaaaaaaatgctgatagaagacagacacatttgaaccttataatggtaatgtgaggacctggcacatatagcagaatttttagg

SEQ ID NO: 64816 - DNA, 1162 bp, Bovine  19866881232859
  misc_feature (1)..(1): n is a, c, g, or t
naactcagcaactttctgagagtgggacagggaaacagcctccagtggcctctaggactctcttccttttctggtgccatcacacccaggcaggaaaacccctggcctcacctgctgtgtgtccaatggaagcaggctgtcatcacaggccatggaatggagcagcaggcaggatgccatgggtccacaggctcagccttttgctttcacagaggtgggcactcctggccttcatcattgcccaaggatcgtctcttagcctctcacagtgcccatagactgggatggtccaagaaaagtaaaacctctgccccctgtcccaaagagcaggctcagaggagaaagggcactagggccttctctggacctcagagcattcaagtgaggagagcactgaagcaggagccaggagatctgtgctcttagctttccaccaacttgccaggtggtagtaaacttgtggaaagggaaggtctttggaatcttgccatctcagtttcagctataaagtgaaggcaaaaatacctgccttgtgggatgattaggatcaaaaggagagaatgaatgaatacaaacccagaaccaaatgtactaggtttatcatggaggctccgctgtgccttcacgctctctagccaaaagcaaaacgctgcttctgggtaaggaagaaaaggaggtactagtggaggagagttggtggggggcagtacaaagagggaggaggagtatagcagagacccccccccacacccggccccagagctctctgcagaggaggagatcactgttgctctttctccacccagtgggcatcccggctgtgcccggacctggcaggacaccatgcaaccagcagcaggatctcctccaccccccaaccccagtcccttccccttctttggttcttgtgcctccaccccttgctttcctctctagcgttcctccaacagaagagacagcagagtcccagcacgctgacagcactgactttaagccatcggagacttaggggatttgttcttctctccactcaccccctctccagagcctagtaactcatcaatagcggaaatttgaacaaagtggagaacctgggatgaaaggagaaaggctgcggtgattggggtgggggcaaggggcagggggatggctttaattaggg

SEQ ID NO: 64817 - DNA, 1591 bp, Bovine  19866881287410
  misc_feature (1)..(1): n is a, c, g, or t
nagagtggtggcccgtatccgcttctgcccgcaccactcatactcctcaaagcggttgctgttctcatgctcgatgtccgcggcatcgtcctcagccatgcaggagccttccctctgtgaagagcagagcaggatcatgcgggtcccaggccgtccctacctgctccccagggcctgcgaggaaggcacagcccaggcccccagctgcagtgtgccccacaggcccccggctctagggctccttggaagtaaaccaattgagagatcaaagacctgggctttttcccaataattttccactggagccccaggggaggagtgggagagtgaaagcaaaggaagagggcaaagaacagagaagcagcagctgctgagaccacgtggagaccccaacagcccagagattggaggcagtcagcggctagtgtcaggggaagggggggggtaggtggtgatggcccctctaccttagaaaggcaatgctccacatgcctactcatctcctgctccgatcctgccagggggcggctgcacaggggacatacctgcccttcatcttgcttcctccgtttcattttcccaatccgagctgcatggagaaaccaaaaacaaagcacagaacaggcagacggtcactggagctcccaaggtcccagcgggactgatatcctgacctcctcccagacattagccctctggctcacgcccaatcgcgccctcgttacgcggcaccttcagctcctctggggtctgggccctgccacaagtgcctggggaggagactggtgctaggccagccgagtgtccactctttggccacagatggctcaagctcaacccacagctgcctacctgcggtgctcaactgagtccagtgagcaaagatgctccccttggcacttactaggtatctccccagaaggccaagaacgcaggcttttttagagtcaagacacacaactttagagatcacctcttggctagaatccaggtctctccaggggcctgatttggccagctgttcacttatcagttaaaaccattttgttcctgggccagcaggcccgaggtacagccctcagtctcctatatagaatcaccccagggaggatttttctcaggtccgctggtcccattttacagaagaggagatcgaggcccagtcataaaggtacagagggtctagtcagagagtccagaatatcctgagagggtagcccttaccgtgcctacctgaacctgttccatcatttctaatcagtgaagaggggctggcaggcccccgagggcagagggctgcctgccatgctgtcccacagggggctcaattccaaagtgcacactgcaagcccacagcactgctaattaatgctgagagatgcaatcatttctaattagctcactaatccctctctgcagccctcctgtcactgaagcaggaaggggtcaaaacaagggactctgttccctctatctcctcccttgatgcagagctagccccttggagaccagactgattagggcgggggtggagccagccaaggaaggaagggttccccactgcaagaccagaaagaactttctcgtggat

SEQ ID NO: 64818 - DNA, 1199 bp, Bovine  19866881306351
  misc_feature (1)..(1): n is a, c, g, or t
ntcgtcctatttgctacagaatccaaagtaggagaagctctcgagtcaacacagatccaactctgatgaatgataccacctatcaaattaagaaaaacatttttcaaaatttctgttagaaacaggtttagcctaaactcacaaggggctctatgaattcaaatgccacactagtttcacagtcatggagaggattaaaagaaagattagctagaaatctcctgaaccattttgtaaatcctttgtcctatcactatcaaccactgaaaagattcgtcagttgcccaaaacaaccctgaaagaggcagatgtctgtggctaacagcttaatggctagaagttcaagtgttgggaagcagtgtccactcattcatctatttatccattcacccaacaaatatttattgcatgccagttacgtgagattcaacagtgaacaaaatagccaggatcaaggagcttaaagttgagtaaatgggattatagtcaggtagaacttgactcaatcccagctccactacttagctaagcaagtgaaagtaaagttgctcagtcgtatccaactctttgcgagcccatggactgtagcctaccaggctcttccgtccatgggattttccaggcaagaatactggagtgggttgccatttccttctccaggagatcttcccaacccagggattgaacctgggtctcccgcattgtaggcagacgctttacaatctgagccactaggaaagatcacttagctaagagacctcaggtaaattaacttctttttgagcctcagatttctcacctgtaaaataggaaaataccacatattccatgggattgtatgctaatgtatcccccccaccccaaaggagaggcttagtaggtcatggcacacttataagaagaacagcttaatgttcttcttataagaagaataacagaaataataatagaaaataaattatttttcttataataagaaaaacagcttaatgattttcattattatcactcagaaagtgatacaagcagttgaaaaatgcctccttctaaatcaataaaatgttttctagtgaaaaagctgataaataggatctgcacaaggaaggtatcattcagagcactccttgaaatcctgatgctttatgaagttatctccactccgatgttcagtaaacatctcaaactcaatctattcaaaa

SEQ ID NO: 64819 - DNA, 1562 bp, Bovine  19866881325988
  misc_feature (1)..(1): n is a, c, g, or t
nagatgaggccaaggtgaaggaagtggaggagaccttattttatccctacccccaaggagtcatctggggtctggaccatgactgacccttccctttgttcccagaagtcacctgcatccatcgggtataatagttgatcaccgtggcaacctgggtctgctgcagcatgacctctgcgacccacactggggaagagcagctggcatgaggacactgctggctgccctactcttagcccacagctcctagaccccaaacctgaggtcgtctaggcaaagcagccctgctccaaggagatgtactcaccagcgtatgcccgcctgtctaggtccacctcatcctccacctgccaatgcaatcccatatgggcagttagtgtggaggggggcttgggcaccagcctcctacccaccccctcacatccattgtcctcctaccagccttctccagggtaggtcccgcttctttcggtcataccaatccagcaagctctcctggagggctgtgacctcggccacatctctgaatagatggtatggggagacagaggcctgcaataatgccttctgctgcctggccggccctgctggggtttcagaaaactcagggatcgtccctgcacaggctgtgcaccagaggcctggtttcaggctgtccacttaaggcttcacccaccccaatcccttgcttgagctcagactgggaggctctagggttttgtagcctaggtcaagtttctagcctttatctccccagggaggtacccctggctcctttgtctctggatcataatgaaaatccaagtttctgccaaacatacacctgtggagggccttcccattcacagaacactttcgggctgataaactcgttggatcccatgaaagccaagtgaggaaggaaatgcacagactactgctccatgtcactgatagaaagcatctattcagagcaattatcccaaagtcacagagcaaagtcagaattagatccttaattagtcccttaatgacttgatacataccatgctctcttcccagcctgaatttgccccctttcacggccaattaaaccagcccctgagtctgattaggacccagatccttaccactgggggcagaaggcttggcctggctgctgccaaaggcacatttctcctttccctcctggctggatgcctgcttcctgcgaccacttcgattccccacagctgctcgtggcttcttcatgatcagctagaacagaatgacccagccaaagtatgtcagtcaccatgaggctgaatcttagggtcctgtaaagggtaaagctacctccctccccacaccattcatataaagtgtctagcttttctcaagcactccctggatactcacgggcttacttactcctggggggcttgtggtactgagatatgaccagtagggctgaacttctgcaagtggccttagtgggaccagcattagtatacacctggagacataagtaagaggccagagctgggctgagtcaaggaccaaagcctcctgtgcaggagcatatgtgtacccctgggagctca

SEQ ID NO: 64820 - DNA, 1971 bp, Bovine  19866881334577
  misc_feature (1)..(1): n is a, c, g, or t
ncctgtcctgcccttaactcgaatagcctcagagattggggttgaatctggagacaatgtgggtgccagccacctctggaaagataggtttgtggaagatgaactgttgctagagtttcccttcttaagccttactagggtagggatggaagattgttggcatcaggtttacttggcttgattctggatttcttctgtgagcaggttgtacacgcaagacaagaataatcgatgttgtctataatgcatccaacaacgaactggtccgtaccaagaccctggtgaagaactgtattgtgcttatcgacagcacaccgtaccgacagtggtacgagtcccactatgcactgcccctgggccgcaagaagggggccaagctggtatgtgtttggggagcaacttcctgtagggggtgcaggaggaggccagcctgatttcagccttcttgtgatgaaaactctgtccagttctgctactgaagggagagagatgaaagcctttagtgctgaggaaggtggcagggctgtgggatgtgacactcctgaactagggtttgggggtccccctctaagccatctgtatttcctttattcagactcctgaggaggaagagattttaaacaagaaacgatcaaagaaaattcagaagaaatacgatgagaggaaaaagaacgcgaaaatcagcagtcttctagaggagcagttccagcagggcaagcttcttggtaagatgacttctgcatttggggaggaggcgtctcaagatatggtgtgctctctggaggctagagagttcaccagaaggatttggtaacagtgaacaagcacaaatcagaatatttggtcatctggttagtttgaagcggaaatggaagatagtgggcaggagcccataggcctgaacttggtctaggcctctgaatttcagtagtatcttgagaactcgtctgtgtccaggctgaggggattgtctcagtgatgaaaactttgtccagttctgctactgattttcaaagtgatgataaagtatatctgaggagacattgggctttgtgtctgcccccaggatacctggaccaacttgggcgcttaaggggatacatagatatgggtagggccacagtgtcattttcctgaggaccacactctaatcttgcagcatgcatcgcttcaagaccaggccagtgtggccgagcagacggctatgtgctagagggaaaagagctcgagttctatctgaggaagatcaaggcccggaaaggcaaataaaccctcttctctcctgtcttagctcatctaataaaggcgtttactgttctatgccatgttcatgttctgagagtacttcattgtttggcacactatagaatgccccagttccccctgcctgaaggccaggcctgttacggggctgtgactctagccggaggaacagttctcgctcctgaggctgagtttcagtggcaacagggatgtgttgtgcaggctgagtagagattgagggaggtaacccagcttggggcccctgcagtattgggctgttgcctggaccatcattggaaccaaagccatgttgcctccctaaagttcttttagagaccctgtatgcagactttggtttggggtttttttcaggctcctggtctagaaaccttgaaattgtgttctacacttaagcattgttgagcaagttatacatattaattatctcttgagctctaatcctttcccctctccttactcaaaagttagtttgtttaaattgttgaattggtttcttcagctttcccttttcatagttcctcagttatttgattgtagcaaatagtggtcttttaggttaaagacaggttcaatcttagcttatccttgggtcataactcccacatcaaatgtcaccaaattttgtgtggtgctaatggtaaagaacctgcctgccagtgcaggagacataaagagacgcaggttggt

SEQ ID NO: 64821 - DNA, 665 bp, Bovine  19866881379053
  misc_feature (1)..(1): n is a, c, g, or t
ngactctgatgacatacatggttgagggtggcggctcaagcaccatgtctcaggccaagcgctggctttaccagagaccacaagccagtcaccagctgcttcgcatcctcactgatgctcttgtcccttatctggtgggacaagtggctgctggtgcccaggtaagacctgagggagagacatagcctggggcttaatctttaaggaccagaaacaatacagttccttatacctgagaagctaggtatcttaatgccaggcataaaagaggcttgacctgcagtgatctggctggagcagccaagcccagatactggcaggggggcttagtgctctgttcaaagaccaaagctagcactgggatctggagaaggcaaaactttttgactggaactaggtttataggcttaggcaatctcagggatgaagtcacttggggaaaattgaggcatattctacatgtgcctcctctttgtatgttatgtatttcatttattttcatcaccctgtaattgtaggcattgcaactctttgagtcccatgcagggcatcttggcccacaactcttcagtaagtttgcactgccctacatccgtgatgtgtccaagcgagtgaaggccgggctgcaggaggcaggcctggcaccagtgcccatggtaaggatg

SEQ ID NO: 64822 - DNA, 1048 bp, Bovine  19866881385818
  misc_feature (1)..(1): n is a, c, g, or t
naaggtgaaaggactgtaatcaataaatggtctgcaggctgtcatttcatacaaattagagtcagagaaatatatgaatattcacttgaataaaaatcattcattataggagtggcccttcaagtaaaaggatccctgtcaaggcccaatgtggctgtcattctttgttccattttgtaactaaaaaacaaaaacaaaaataactgtgtagagatgaaagagaaaaaaataataatttttcatatgcacccacctctgaaacagtcaagagcaggagcaaatttcttcatgacacagccaaataatatgtcaaaattagatattcaaagaatgttaataaatgacaagagacacttcagtcagtcacatgattccgatccctgcagatgcacattatgattcagatttgaatagcaaacagagtaggccacagggcagggtgggaggacttgaagaaagacaatgcaaaaggtcatcaaaatgaaaactgtcttcttgcctcaaaatttgaagagaagttttactgaaaaaaaaaaaaaaaaagctttaaaccaattgaggctgaaataattacaacattttatgatctaacctcttaatgatgaatagaattcttctccctgcttaaggatcaaattggttgggctctacacttgtctggcaccatgctgtgggctatttcctttaatatataaccaatcaaagacgtattcaggcttttgtgagacccaaagctttgctaactgcatatcctagagcatcatgaggtttttctaaaaggaagcagacaaagcgatatacagtgatagcctcccttggataggtgatattcagtagaccctttctcaaaggtagataaggaaaccttttataatacaccaaatagacaattttctttataatatctgtagtacttgtcttataatatttatactaatttttttcctcccttcaatttatatcaacatacttcaaggtcacagatgcttaggggagtgacaaaagaaaacaaactcttcaaaatatgtaactgttaaaatacataaca

SEQ ID NO: 64823 - DNA, 1223 bp, Bovine  19866881480974
  misc_feature (1)..(1): n is a, c, g, or t
ntggttgaccgttttcccagcaccacttgttaaagagattgtctttaatccattgtatattcttgcctcctttgtcaaagataaagtgtccataagtgcgtggatttatctctgagctttctattcatgggtaattattaaagattgaaggcaggaggagaagggggcgacagaagatgagatagttggatggtaccgccggacttgatggacatgtttgagcaagctccaaaaggtggtgatgaacaaggaagcctggcatgttgcagtccatggggttgcaaagactcagacatgactgagcgagtgaactgaactgaattattaaagcaccaaactactcttggagactggattgagattggaccacatagaaaaatgtaaattgtgacaattcacagtcgtaccaaatagctgaattcattagttccttattggcaggggtgggtattgggtgggtgattttgggtcatagtcattgtttgtggaagtgctgagtgggtaaaagcatggtagttaccttaccctgacagttttttcccaggggagtaagtgtgtttttctttctccttgctgtaggaaattgtttgccagattgtgttacttataacaatctatcatggaacagctgccaggaaaagaaaagaggctattcccagtagctcttccctcctcctaccctaccattaccaccacacacacatacatccggttttatttttttcttctagttttacttagtggttttggcttgattgaaatgttcttataatgacagatttctggactttgccatggctttgtaattggttttctaagctctatttgtttgctttagccaagactaatcggcagcagttcaagtttgaattctggggtatcttgaacactaaagtgctatcttctaccttcccttgaagaccttgtatgtttccacttggtcaaaaatgcacgcatttactgtcctttaagaactgtgcttttcacccttgacgttgcccttgttccgttacaggagcaggcttcggtaaagcttactgaggactgttaggatagtgaatagggaggtctgtggagatgccagttggtctctacagatgatgcatactctgatgttagaaaagaacacaaggcaactgagggttgatgtctcccaggaactttcaagttaattgcatttcagatatacagttgcttgacagtccaaacagtctatgtttatt

SEQ ID NO: 64824 - DNA, 695 bp, Bovine  19866881547737
  misc_feature (1)..(1): n is a, c, g, or t
natgaaagcccacaacgctcctgcagctgtcccaggccaaaggttacagcaacctgagagcagaaggaaggaggtcaggttggaatggagaggccgggcagcccggccctccacaccggaacctcctgcaagcctgtccagcaacacccacctgcagggcctcgcaaaccagctccacgtccagtgccttcaccacaaactccaggcacagctgggaacagaaacgaaggtgggctgtgcccagatgtccctgttccaaggccccagccccaggccagaaacagtgaacagccttggagcagtgagccacccaggctactagcagccccaggcctacgcagacctcccaggccaagggaggcggggaatcacaaggcctgagactaggaatagcaaagccaagcccagcagcccaccttttagtacattcctcactaatcagactagataagagccatgtgaaaattccactctccttttctttcaagacacttaactttttccacacttttctctgaattcaaagatactattttaaccagaaacttgaattcatctgtgatatctccctctcaccccgacttccagaaaagccctgggtaatgccagttcacagggtcaaaccagccaatcctaaagggaatcaaccctgaatattcactggaaggactgatgtcaaagccaaaactccaata

SEQ ID NO: 64825 - DNA, 994 bp, Bovine  19866881581867
  misc_feature (1)..(1): n is a, c, g, or t
ncgcataggcatgcatcaatgcctgtttatatagagatacccatacttctttctgtattggtgcacattcctctccacgttagcgggtgtgtgaggcagggtgtgaaccgcgcccataagagacaggggaaaggagacggctgcccatgaacccacctctcgaagttcctccagcccatactccacagccgctgtcaacacctcaagcacctgcagagtgagtggttggcatggtagaagagagtcttcctgcccctcagccacccagaacttgcccacccagacccttgcccagtgggctcacagagtggcgttgcagcttggcactgttggtatacagaaactccagcactgccaggaaggcctcagctggcacggtactcagcaccacagggctaggcaccccagggcctggctctgagctcagaagtcgctggaagaagttgcatctacacgccagcaagcaccggtgggcaaacacctcctgccgttcttgaccaaccacaaagcgaacatcactgtgggagagaagggcagagtgccagaaagaagaggctagagtctctgtgtaactctagactttgcctttgccctctctgggcctccgtttccttatctgccatataagaggcagtccctctagcaaaaggtctgggtcacacaggccgggttctaaacacagctccagctaggcaagagaagcctagggaagagatttctgacctactgcctctcaggtttctcatccctgaaatgagatgctcatcccaaaccctagggtggctaacattaggtggctatgtttgatcactgagggggcaccagggctgaaacaagatcaatcccaatgtccctctcctccccagcctgtgactctggtgaagggaaactctttttggcttctccagactgcaaactcagccttttcagcctcctccagacaggaggggggaggaggagggtgtggagggcacgactgcaaacagacacgtca

SEQ ID NO: 64826 - DNA, 1431 bp, Bovine  19866881591457
  misc_feature (1)..(1): n is a, c, g, or t
naaaccaggttgtattaagcatttttccagataaagatacttaaaggctcaatcaggcagtcacccagggtagctaaaaagtggcaaaggcaggagaggaaaccatgccttactccatagcttcaaaggctctcttgtcccaagagtgcccccagctgatcagtatcaacaaagacggatcctgtgaatgtgctaggggagcacttggaaccccagctcctgcctgttgagggcctgaagcagggagttactccagaatagagcagccctagaaagagccaaatcaacaggaaagccaccatctcacaaggactgagcatggagtttgggaagccttggcctgcagcctggcccatctcctctgtttccgctgctctcactacaggtgtgaccatgttttggtgcccacttgattttgtggacaaagatctagactcttgcaccttgactgccctaacccttggcatctcaggctcaatccaccttgacactctagagccagggctggggtggagaagggatgccaggtatcagaaaggcattgagcaagtgaccctgagagttcgagaaggctgtatggagccatgctccggtacaaaggtgcatcccctaacctgcctagagccggagggaatgcctctctggtaagaaggagacgatgagagacactgataaattgaataaagaggtgaatctcacaggactgtcaaggaaactaggacactggatgcgttgctcgcccaagccacccatgccagaaaactccttgtggtcccaggaaagcaccctgatggactgggcatcacctggaaattctcaaataagcaaggcaggtttgcttattttcttgccatccatcttctaagtcctgaactaagcttactaaagcatgatagggaaaagtgtgttccctacctggaagcttccactatcaggaaaagtcaaagtattgccaaggaggcagcatggcatggtccaagcagcacaggctttggaggtaggtgtgtgtttatcgctcagtctgtccgactctttgcaaccccatgcactataatataatccatcaggttcctctgtccatggaattctccaggcaagaatactagagtgggttaaccggttcaaaccatggctcggctatatcccagctgtgtggttttcaaaaaaccacttcacctgtcccagcctcagtttcctcatctacaaaacgagtgttaacactccctctcagttatgataaagacgcttaacatggggccggcctatgataaatgctctccttttcccaatctggggttcagcctggcagcagaaaccaagtggcaggaactggggatcttgaacatcgatggccttaccagctggtccagagacccccaagccccttactgccaacccccagatataccacaccctagtcagcacaaaaaa

SEQ ID NO: 64827 - DNA, 889 bp, Bovine  19866881721333
  misc_feature (1)..(1): n is a, c, g, or t
ncctctccatcttcagaggtgattaataaatatagacttatccataaatcatttctataggagccaaatggttcttcttcatgccgggaaaagaaaatcatagaaacctcaaaacccttgtactaagccaaaggcccttcacaacaagagagaagaggtattaaaagtcagaaggtcactaggtcttgtctctaaataaaatttctcagagggcttttttgtcctcctaaatcaaaagacatatttcaaaaagcaagaagcctccagcacatgggctgccagcctggctccctgtcctcacaaggccttggagacaaggcagccgctctctcctgttactgctggttccatctgcagaatggacagaggcctctcccagtcatactcctcactctcagctcctgattcagagagagagagggagagatgcagggagaagacagatgcagagggagagagagaaacactctccttccaaacctcatgcccagggtgtcctggccttcacctccaccttagggccaaacgtactacaatatgtcactttctcctcatagatgttcttccttctgctccctactcataccctcttcacacatcccttctgctacccaccagctccccacagactccatatgcccccatctcgtccccacagttagctgccattccctccatcctctttccacagaccattttccctatggctttcctgcacaaccctctgccttcaccagctgcccatacttaccctcattctctacccacagacccccttttcctcatcccagactcaattctgcctctggctccactctgcaggcctgccctcatgctctccccacaaaatgtaaattatctaggttcaccagagtctcctgcccaagtt

SEQ ID NO: 64828 - DNA, 1297 bp, Bovine  19866881814865
  misc_feature (1)..(1): n is a, c, g, or t
ncgcttcagttgtgtcaactctttgcgacccccacagaccttagcccaccaggctcttctgtccatggattctccagacaagaatactggagtaggttgctatgcccttctccaggggatcttccccaatccacatctcttatgtctcctgcaatggcaggtgggttctttaccactagtgccatctgagaagccttcaagtaggcattattaaatgtttgttttgcatgatatttatcagaaaattcctctaaaagtacatctctcttttttatcttaaattacagtaatgacagaaatgggagggcttctaataaaagagggaacttaaaacctgcctctattatttaaatgtacttaatcattcatttattaattcagtgatttattatttaccttactggatactagacttacaaacttgagaaagatctggtccctgtcatcaaagttatagtacaataagataagcaatggtagaaatacagggggcccaagaggcacaaaggatgggatggggtatcaggaaatgctttccaaaataagcgacttgagttgggtttagaaggatgaataagaattagcaaagctatgaaggggaagaagagtattctgcatagtacttaagcatatatgaaggcagagagagtttaacatttaaatattctgaaatacatcttgggttccctttctctttgactcagttcattactgctgcctgcttgagtcacgcaggtcccggtggacctcctggagtggaggctgaaccgtggtgaactcaggccttggcagatgtgtggatgtgcacttgtgtggtggctgtggaacctcgagctgagaacagggggctcctttggagcatgagcctcccacagggcgctcttgggatgcctgtcccggaattacccagggcagtaacaaagctttcttttcttctttacaccaagccagcaggatgggatgtctgctagcctttgtgtttggagccaaccaacaaacatacagtgaccagtacaatggcattgttgggcttcagtgaaaagtaggtcgtggcccaggccctcctctgcagagggcccatccaaagaacagaggttggacaagcctctgatttggctgtttggtattgatgctggtttctgatgggctttctgacttacttttggtgtgtaacattgtaggatttcttcccattgtttccaaaaacctctatttggaatctctgagttgcctttgactcttttcccttagttctcatatctactactcagttgctaaatcatttagattctacttc

SEQ ID NO: 64829 - DNA, 758 bp, Bovine  19866880510067
  misc_feature (1)..(1): n is a, c, g, or t
ngagtccacctacaatgccagagccctcaacttcattctcaacgtgagtataaaaagccgagctatgcacactgcacagtaaacagcccacagaagtcacatcagtgcccactgtgcaactctgaacaattttaaatattcctgtctggttgcattttacacaacactaccacaatacagggcttcccaggtggcgtggtggtacagaatccacttgccaatgcgggagaggcagaagacacctctggttctatccctggggtggaaagaccccctggaggaagaaatggcaacccactcaaacattcttgcctggaaaatcccatggacagaggaggctggcaggctacagtccatggggttgcaaagagtcagacctgactgagtgacagcacacacgcacatacaaaccgcaatacaaagaacacatttagacacttctgagatgagggaaatggatgtgatggtgaagaattagaaacaggagcactagctgcctggaaacactaccgttagagagaagaaaaatctaaaagaaaaaaatcaattaataactcagtcagtcattcttccatgcagatctttgtagagaaaatgaggctattttgtcaaaataataatcatgttttctaagggctgtcctgctaaaaatacagcttctctggagaagcagctacatgctctctttaaatagctccatttggcttgcatctctgcttgtccttatcttaacgaataagaactgtctaatatccctc

SEQ ID NO: 64830 - DNA, 1514 bp, Bovine  19866880521880
  misc_feature (1)..(1): n is a, c, g, or t
ntaactcagtttgatatcattaattcacacaagagttttgcatttgttcctttcaggtaaattcagtcttactctataatcaggaactctaagtgaatgcaacttaacccaatgtttctcatttaagaatcaccagtaaaatttattgaaatactaatccttgggccccatcctcagagtttcagattcagtcaggttcagttgggacttgaaaatttaatttgctgacatattctgaagattcctggtgcttccagtcctgatgtcactctttgagaatcactatactaccatacgcaccacttttaaaaaattaattaattaatcagtttagctgtgttgtgtcttggttgcagcacatgggatctggttcctagatgaaggagtgaaccccatgccccctgaattgggagtgtggagtcttaaccactgaccaccagggaagtcctgtgcattactttttaaaactttattttgttttgaatctccccaaattaatttcttttatggagctatacttttatttgaatatgatacttaggactacattattcaaagattatgacattttctttctatgcttttctttttaatatctgtttcttacttgaactctctccccttttataacatttttgagataatattactatacaatgaatcaaagatgactatagatcaaagtttgtattatgctcttagttaattagatgtttatttctcacctttttccaaaatttgaggcagatagatcaaagcaaagctaattaaaccacaaagttattgaaatcaaggcctgatttcctttgccccttgttgtggactgatcttcctgcttctaattaccttcccaccactgaagtgaccacactggccaaggcaagaatcatgatgattatggtcagactggtttgcgactttagcttatttttctaacatattccatatacactgtctacagagtgcctgattttatactttacactcagcaagaaagtcaccttaacatctccatctatctactgcctgccagagagcagctgcaatgtatttaccatcaactgagaaagaaatctatatttatcgggatgtggaagatgctgaatttaccgacaattgacaaattagtctggaatgagaatgcatatagaaatagcctgcagtatgccattatgttgtgacataaatatatggtctcttccctcaacttatgccagaagcaaatgaacaatgtttcagcaacatgagtaatttctcatctacattagtatgcttttatttttttttttctctctctttgagttgttaatagctataaggggatatcctaataaccacagcgaaattcacttagaaagccatattagcaattagtaaaatctccaaatgctgtcgaattattaatttaataaaaaaatttaatttaaatttattctctctcccacttgctctatatttatggtatgtgcatatgcacacatatatgtgtacacacatagctctataatagcaat

SEQ ID NO: 64831 - DNA, 1217 bp, Bovine  19866880532286
  misc_feature (1)..(1): n is a, c, g, or t
ntccagatataagaaaaacttctcctttatctaacttagagcatatttgttctcttttaacaacttagaatagtttgataaattttatctttgtaagcagaatagaaatgtttatcatttttctccctgactgatccctctggaactcagaaaactcacagtgcttattcttattttcatggcaatatagttgctttcataagttcaataagaatctactcttcttgtaacaggacacaaatagaaacattggttttattgccaaggctttagctggaatttcacatttgagaatgaacctagattcagatatgaccagacagctttgaggaactaagattgactttgctgctgctaagtcgctcagtcatgtccgactctgtgcgaccccatagacggcagcccaccaggctccccatccctgggattctcaaggcaagaacactggagtgggttgccatttccttctccaatgcatgaaagtgaaaagtgaaagtgaagttgctcagttgtatccgactcttagggaccccatggactgcagcctaccaggctcctctgtccatgggattttccaggcaagagtactggagcagggtgccattgccttctcccaccttgtttacaggtttcccagaaaccttaccaggtgcgtaaggaagatcggttcccaggcaggcccaggaatctcaggatattctggggacctcaagaagaaaggaattcactcaaatctatcaatattgcaggtgatatctgatggcaaatgtttgacttggcttcttagccttgagaggctattgaaagtttgctctgggacttccttggtggtccattggttgggattctgcctgccaatgcaggggacatgggtttgatccctggtctgggaagattccacatgctgaggggcagctgagcccatgtgccacaactactgagcctatgtgcaaaagctactgaagcccttgtaccgagagcctgtaccccacaagaggaaccaccacaatgggaagcccatgcaccagaactagagggtagccctgcttgccaccactagagaaagcctgtgcacacgcagtgaaagagacccagggcaaggaccccccccccccccgcccccagtaattaactgactgattttttaaaacgttcaatccgaagattccttatgaaaagtgccagcaaaacagactttttaaaacctgtatagtaat

SEQ ID NO: 64832 - DNA, 1423 bp, Bovine  19866880534483
  misc_feature (1)..(1): n is a, c, g, or t
ntcctgcgtctactgaatttttcttactactgagccaccagggaaacctcccaggcattgggctctgggcaaaatgttcctcatttcaataagatgaaatagaaagaacacagggaattttgccatatttcctatgttctgagtgcaaaatttcactctgacttaactggggaaaactcattctttcagccagagggcttctaaaaacccagagatagaatcatatagaatgtcagaaggagatactctctccgggagagatacacatggtacagttaggtataaatggtgagtttctattttgggggtttgaaaacaaaattcagtatatcttcagcatgatctacagtgttttttagaaattccatgtgttgaagaaccaacatgggtcactttagaaaatgcccttgacaatggggtattttgaggtatccaaatacttaacaatatttcctgattcctactctctcttccctggcaggaggaaaagagcaaaagtaccatctctgcaggggtggatccttgaaggatagcagcagagtcagaacgtccttcatttaaaagccacacttttatcatcaacagaagggtctgtgtcatggggggtgggtagcatatgggaaacaaatactataaactagatttaaaaactgttaaaaaaaaaaaaaaaaagccccagatcacagccttgactgtggaataaatagcattgcgaaggcaggtcgaaggtaacttagaaaatgttgcagagttctttggttaaacattggaggggtggtggagatctcaaagcaacatcacaggatgtgtgtggaagtttccagtagtttcctctggcttgactttgccttctactgggtgggcagaggaaaataggtgtctctcctgggcccaaacctagagacagaccacagacctgatgcgttgattcaagagctaatactagtgcagctttctatttatagaaaataattctcttatcttgaatcaacaaagaactgggctcatgctaatctccatcataattgtgacactcagttcttcttgattctacctgactttccttgtacttctgcttgtcgtagttactttgttgtgtttccttctgagttaattgcctaactctaatagatggcattgtaatagaccttgtctcatcagcattcagaactgttctcaagcttgaaaagaaacagagtaacgaaaagatttcttaattatactctgcattctcactcattaattgacctttctttcaagtaaccaaccataaatcaactaatgctgtatacagtgcaaataaattaacaaatgtccacataacattgtgtgtctatcaggagaaatttattcactagtgatcgggctctgtttacaaccagtatttgagggtttgaactcattaatattacaaaaggaaagt

SEQ ID NO: 64833 - DNA, 1266 bp, Bovine  19866880602050
  misc_feature (1)..(1): n is a, c, g, or t
naaatttggactaattgtaagaaatcttcgctagaggctcactgaagtattaaatattggcaattcaacattttctcatgactctcctcttattcatatgcctttgtgcttgtatgagcctcatattagtccatggctaatgtttttatggtagtgagcactgaggggagtagggacaggccatcttcatttcatcagaagaatcattctcatgaagaggggaggttttaccactttttacaaaactgaagaaagaaaggttggactcacctctccaccaagtgtcatgggatgttgtctgctcatatcctaccttgcaagatagaaacacagtcaaggagaaagattccctaagtgtctcaaatcatactaaagaaatcattgaaaattgtgtctttgtctcacgctttccatatgacgtttacgtttttatcattctaattaaattacaccaaagtgtgaaataaatgtgtttgctctttttgtcatggtttatttgcctaagaataatgaaaatcatgcatgctctttctgtaaaagctttacggaatagtctgaagtgttgaaagaagcagactgatacaggtgggctcttgatgtcacttaactcttacaagtttatggctaatattttcatggtagtgatagtactggtggaagggaggaggccattttcattttatctatttattaactttagcacttgagcaaacaactgtaacaaattgccatgggagaaggggaaatgaaatgagaaaacagggatgatttttagattctatcttgtttgtcatactaaaaaccacaaacaaaaaagtagtttaaggagtcattgagggagaataagtatggaattccatcgtggaaattttataatcacttccctaaaaataactacattttaattgccaaaggaaaaaaatctacatacataagaaccatcatgaaaaacgaaccattgtgatgaaggaaacaaagaaagattaaattcaaatcagagtatttgcttaatagcttaagcagttgctaatgtttatatattacaatgtgaattatcatgcttggataatgaatttgttgctttttttgttgctttttgaaaagtcatgaacatttcaactcacaacttctcatactaaacagatatgcaaatattgttaagatgattgtctattttacaataaggttaattttgataaaaggcacattaactctataatcataatagggctgatcaagactgggttgatcaagaaagcaacaaag

SEQ ID NO: 64834 - DNA, 1370 bp, Bovine  19866880635544
  misc_feature (1)..(1): n is a, c, g, or t
ngagccttctaaaagcagtgcttaatgcctcatgaaggtgttgagaaatgctgccttcaaaggtgggtttgacatggttcattattcttattcgaattgtagtcagttgttcataaatatccttcctgaactagcatctttcatgttgttgcacagttgctaggttatgtctgactctttgtgaccccatgggctgcagcatgccaggcttccttgacttttactatagtccagagtttgctcaaactcatgttcattgagtcaaaaccataaagcctaagaaaaactgatgcccagaaaacaatggagccaggaaaaatagaataattgactatgacttagatataaggtcagaactgtttttctcatgagaagaggagaaaactgtgagtatagtaaaacaggctcagtttttctcttggtatttccccatagtttgatacaaactcttcattttagcaatccttttcaatctaccagtgggaaaacagataagagtcaaaaataatgcaaaaatatatcacagaaaatgtttgtattgacatttttaaatatgcaaaaataaatatactgtgttaaataaaatatatcattaaaattaattcacctttttttcccaatctattaaggtggttaccaaaaatgttaaattatttatatacagctgactttgtatttttactgaactccattgctagaatagaactatttaacttttcaatgagttgagaaagatttatctgtaagattacattagtttggagtacataagtttagagtgagtttgattaataatttgagtgactaaaatacattatgcaattaagacagactatacccaacttcagacagtaacctaattcaacacttgatgatttgcatgcagatatagaaaatcaatcttgatcctccacaaagcttaggatgtcttgctgaatggaagaaaagtaagacactttcaatagtttctttgttgggcattcagatttaatctactgctcaagtttatacatggaatcaatttctttgtgagaagttctacttcttgcatgcagtagaatcatacaatcacagataatagcaaaattcaagtgttttatcttcagttgctagtcagagagttctgagacaccactccccagcccatccacataagaactgtatgatcatgacccaatgtgttcttcctgattggaaatactttcgtctcagccaatactcctgctagaaattctaagaatattgctggagcgatgtgttcaacttggagattctgtgcattttggaggcaggaaacaggtagattaggaagaaattgggatgctgttgtatggacagtagcaggaatgtctgggcagtattattctgaa

SEQ ID NO: 64835 - DNA, 1878 bp, Bovine  19866880651612
  misc_feature (1)..(1): n is a, c, g, or t
nggagggattggggtaggaggagaaggggacgacagaggatgacatggctggatggcatcaccgacttgatgtacatgagtttgggtgaattccgggagttggtgatggacagggaggcctggcttgctgcacaattcatggggttgcaaggagtcagacacgacttagcgactgaactgaactgaactgaactgaaggtaatcttagatattattttaagttttgtactgacaaactgagcttttcctttaagtctgttgaatcacaattgaacaggggagatagaatgagatcctaaaatatgaatctagtgcaagtgcctcaacccccccaatcttccgtatggttctgaagtgttcttccttcatgtataagcattgcatcctcacttgtgtagcaggagatcccacagggttcacccctctttcatatctttaaacagtatccactgtgttcgatttcaagggttggtgacatttcaaaaataagtctagcatttgatatagcctggcaaagagcataaaataaaataaaaaaataccatctaccatttattatcactataggtttcataagagaaaggacattttcattttaaaaagcagaagaaaacagaataaaaggcagtccttcacaggaataaatggaactttatgcgaaacacacgttcttttgtgtagcttttttctatctggcagcaggtgcgtgaaaattttgacatttgatgtgcagacgaataaatctgtctgtcagtggacagatggatgaacccagagactggctttgtggagccacagacccagaagattcctgagcccaggctggagtgaggagtgtggttaggattaccagagaccatgttggctgtgctgtactgctcaggagtcctggttagtcagctcaggccagccacactgtggtgaaaggcttcaagtggacaccatgttcgtggtttgcttttttacaaaccccagggccctgtgtggtccaagtcagcaatctctagtagcccccaaagaccagaaaattgcccatttccaccattatgatatttatgtatgcagtttcccctccttcctcttcctgaggtgtaggccagagtggccgctgatgctgtttttgtaacactttgtcctttgggatctgagaggtttaatcaaacaaaaaccaactgtgaaggaaaactgaagccaggaagggatcacgtttatggttttccgcagtctctcccctgagttttcaccttgttttcactcctagcttccctgacttctcaagttctgagacaaaacactctcaaaaataccagcataggaaactttgcacacttctgaggactccaggtcactctcatccacacacacaaggaatcaggcctcccagagacacgtttgcaaaggcacacagcaagttagaatgctccattgtctttattgagaaagagaattctttccccctttagttagctgaaacagaactatagcttttcaaaaggaaatttgaaaataagtcaccaaaaaaaaaaaaaaatcccaataaatactaaaaggaaaaaaaaaagttttcagaaagcacatatttcattaacattcctaaaccttgaaaggcagaagagcttgcttaaaacaatatggactttggaaacaggcccaaatcctaaaaagcagagacattactttgctgacaaaggcccatatagtcaatgctatgatttttaaaatagtcatgtacagatgtgagagttggaccataaagaaggcctcacaccaaagaatggatgcttttgaactgtggtgttggagaagactcttgagagtcccttggactgcaaggagatcaaaccaatcagtcctgggaaatcagtccgaatacttatt

SEQ ID NO: 64836 - DNA, 1658 bp, Bovine  19866880687028
  misc_feature (1)..(1): n is a, c, g, or t
nattctcattaaatgatgcatcttgcaataatgtttgagataattactcccacagtccttaacaagtatttattggaatgtgttaggcgttttagagtacaaataaagacttgttcccctgactgaaaggagcttgcaaggtttatttcgctaaagtgtatctgtctttagtctgaatccaaatacaaaaaggtaaattctcactgggaatgatgtgtgatttggcatctggggtaggtaacacatggacaaacattggagggaggtatgtttcagcagctagtaatatgtatagaggagggaaaaatttcctttttcctgtatgcaatttgggctccgtggctgggatcttataaattagactattgaaagacagattaataagaaaaactagcaggctttccttgtagctcagcttcccttgtagctcagcttcccttgtagctacctccaatgcaggagacctgggttcaattcctgggttgggaggatcccttggagaaggaaatggcaacctactccagtattcttgcctggaaaattccatggacagaggagcctggcagactatagtccatgggatcacaagagttggacatgccttaataactaaaccaccatagcagaattttattaatacatgtgttgcacatacctcatgggaacacatgatgatgagtaacccaaaggggaggttagaacttgggcttaaatatcatcttagactaaagaaaggaaaaggggtttgggatttttagatggtggaggcaagttgtgggaagatgactgacactatgcagggccctgtggggctcttggaccttcccccacttccttggttataggaaacagccctcattcagtctccataccttccttgagttccaagagggcagattcaagcagttgttaattaggtaagggaaagaatggaaggccaaggggaaacagtcaagagcagccttggggcaaggtcctgtttccccatcaaaagatacacacaacaatatttttgagccattgagcagatactgaaacctcctccagatggaagaagttaatgattaacaatggtatattgcccacaggggctcccctgatggttcagtgagtaaagaatctgactgcaatgcaggagaggtaggagacgaaggtacaacccctgggtggggaaaatccactggaggaggccatgacaacccactccagtattccttcctggagaatccctggcaggctatagtccatggggttgcaaagagtcagacacaactgaagctactgagtgcacgcacacacacacacacccttttgtctggcaatgcaataaagttattcttttctacttcacccgaaactgtcttctaaattggatttgacatcatgattcggaatggtatggtcaaggaggtttattctagtaaggtttgttttgcagatttaagttggtgccttctccattaataagagttacttagaatttccctcctcttagctcaggagagggtgagagacatctttacaaatgtaaattttctctactaaaggaaaatgtaggcactgtttttagagcttttttttcattcacttgttcataatggcctttagctcaaaaaagccatatgccaaagaggcatgttttgggatagcttattctg

SEQ ID NO: 64837 - DNA, 1741 bp, Bovine  19866880699013
  misc_feature (1)..(1): n is a, c, g, or t
ntacccaaacgtgccttcctcttccccagttttttccctttacttatgcagaggccaacatgttaaaggacaccttttcttccgttttctctaacgtcaacatgtttaaatcctgctacacattaaaactatctgacgagatatctctttgtcaatcctttactgattacactgattatagtgactttgagtttgttattcctcttctctagcactctgtgacatttctagttttctgctttgccatgtagtattatgagtgttcctcttatctccactactgtttcagaaacctcttggatcaggaggtgtttctgctcactttttggtttttgccccacccccagcacctaccataatgcctgacacagacttggtcctctataaatatttgctgaattgattttaagtttgaattaagcagcacaggatgtcttgggttgaaaaatcacattgcaaatcgcatgcttgtattgctcaatattgctgcaccaatggagcaaggaatatgctgcaaattcttcatataaatggtaggagtaagggaagaaaaggtgctttcataaaaggttgtctacagaggaaataaaagaagcaggcaaatgctatagaatttttttcctaaccaatggtggtgattcatttgtctggttcgcatttctgttagattccagtgttagattcaaaataaggctaatttgcattggcatagtgacttaactcactagtgtattattactatgtaagcaggtgtacatgcgactacaaataaatgcttgctgatggaatcccagcagggcttctgatgagttttcattttgttgaaccttacccaggaaattactgtgtaaaaagcttagctattagttctttgcctgaaatatcgtttagctacacctggccaaattcatggcaattatactaactatacaaagaggacattccaaatttctcatcagcctttctcaaattgattactgaaataatagaaatatacaaatgcacaaactgcaaaaggtacacattaagacaaacttagcatttaaaagtcaagataacttataaaagaagataatttaagtcaaactgttcataggatagaacccatactataagttatcaacactaagctacaagctactgcttactaatgataggtatgatgtaaactttatgtgccttaattgcagccctatatatgcttatgtggagagattacaatttttttctgtattatgtgatacattaaaaagctgacgataaaaattgggctcttagtgtcacagcacataaccacatatatcaaatttttaccacagccaatcatgtgaaatgagcaaagctgccatatattcatagctgtgttataacaaattttatataacaaattttgttatggttattccaatgtagatttgggtttaaaaatattttagtcaatagtcactgtgtatctcctctgtatgggactgtctgggaaaggtttaattataaagaatataagatggtctctgatttcaaagttttcactcattttgaaatgggaaatgaagtaatattcacattaaaagataatgtaaaaatataagacaatgtatgctacatacttgctccaggtgatggtagagtgagagagccaggagaggaagacgttggggaagcttccataaaatcgagtgaccacatgccctgatttgaatggaagaattataatttactgcccatattcctggtgtaacaa

SEQ ID NO: 64838 - DNA, 1134 bp, Bovine  19866880750783
  misc_feature (1)..(1): n is a, c, g, or t
ntaattgcttgaacatcttacctccccctttgtcagaagtcatgagagcaatatagacatgctatgacaaagtcagccgccactatcttggctataattccatgtccagatgtcatcctgtgcagttgctgtgtgattctaattgactccttggggattcccagtttgtgccgctcagggcccaattcagcctcggagttgtgagtgagtaagtgatgacagaggttgactcagtgtgtttgtgtttgtggaagtgttgagagtagaaggttatacaaaggccaacagtcattacttccagggcccagtggaactcacaccttgcttatcagcttttaccttaacataattatgtatatattttgaaatatgaaaacacctgaaatttattaactgaaaggtaataagtctttcaaaaacaaataaaagctagtatgtataaacatgcatatttatacatacattcatgtatatatgcatatatttgaaactatgcaaagtttttaaaataaaggtaggcattttatctgagaatagtgacatctttcctggagttccacatatttgaaatttttattgctgtgccaagtaagtggtattgatgttatatacgcttagtttttctttttgttcttaaatacagcttaaaatatatagtctctgttaagaaattagtgtaccttcaaattcttaatcttactctaaattcccagctaaaggaaacatatcctaaatgtcagtatgagaatgataaaaagtgtctagggtgaagcatagggaagcccggtgtgttgcagtccttgggatcagaaagagtccgacataacttagcgactgatcaacaacaacatcaacggctctattattcctacacaagttgccatcatcattattcgaatgtgatccaactcttaaatttccacacggtttgatgcataaattttgacttctgaaaaaaattttatttaaaaatagctcaagagttttataatagaaaaagaaaatataacttttcatcaaatagtgttgtgaattttatatatcagtaattcaagagaatggctcttaaaatataacttaacttttcataactttttatctgaataatcgatattattcggagagaaagactaa

SEQ ID NO: 64839 - DNA, 1970 bp, Bovine  19866880873075
  misc_feature (1)..(1): n is a, c, g, or t
natttctcttcactttccaccattagggtggtgttatctgcatatctgaggttattgttatttctcctggaagtcttgattgcatcttgtgcttcatcaagcccaacacttcacataagttaaataagtagggtgacaatatacaaccttgatgtacttcattcctaattttgaaccagtccattgttccatgtccgcttctacctgttgcttcttgacctgcatgtacatttctcaggagacaggtaaggttgtctggcattcccatctctttaagaattttccagtttgttgtgatccacatagtcaaagtatttagcatagtcagtgaagcagaagtagatgtttttctggaattccctcgctttttcaacaattgagtaccaccaaaatttttcttgtaaacagaaaattataataaacatagtggaatcaaacacataaaaggctgagttactcacaaagctacaagccatttagattttttggacttgctgttggttagaaaaattatgttgtttgatatgacttgaatttcaatcacgtgtgtaggactaaaaacttggagtttatttcctgccttcattataacccataacccagactgcactaccgcattgttcaacacatacaccttctgaaaggagtcaaaaaaagtatacaaaagctacttgctcatatatatatacatatatatgtatatatatatgcaatgccagcagataaactgcatttctaggaggggcacagaattgagttatgtgactgggtcagattcctgttacttgaaaagttacagaatggagaaaatgctatgacctagtgtataagatggtaggcatgatatctgttgaacatttactgtttttgtaacataaatgataattttctgaaggttgggtgctctaaaatcaaaagagaaacaaataagtgtcccatgttaaacttggtccctcttaatgcttcaaagagatttctgtaaaaaaaatctctttttgagctgtcacttaaatatggtatcctttttacactacaccccattgaaaacatttttcatgaaatacactataactgaatatttgagagaaatatctctcactgcagaaacctatgagagagaaatctgtgttttcagagcttgtcagaaagtcatgccataggttaaaaaaatatataataacatatctagagagggggtcaggaaatagtttacaaagtgtgagaaagttatgttcatatgggaaaataatttcacaatttagcttgatgatgttaataatgtatttatgaaatccctttctcaaaggtgatcagctattcagcttgctttgaaagttacatggaattaatcatggcttcaggataatatatattccctttccaagttatgagaatctgcttaggaggcacagagtgggtggtcaaaagcaataaatgtatttttcatctgtctactcttactctatttttttcagatattttgtcactgtcattagatttgtgagagattttcttttgttctaatttgcttgttttctagtttactgaatttgggagagaaatggtagcctttaaattataaataagactgccaagtagaaattcatacttttgtgaattgctctcttccatcattctttaggaaaatttaaatcatgaagacatacttattatatctcacagtagtattggttgattcaatctcctaattctttcttggaataaaacataccttactttctttcagattcctgaatattaataatagaagcaaatcactgcagcaaattagtgaaacggacacattttaaaacagtatattaaggaagttttctgaagacattgaagtaatatatgttctttttcctaacagttctttagcaagactctttgcaagcaaacaaagttacaaaagtaatgaggagccggatatggaatcttgcacctctgggtcagcagttcaaatctgg

SEQ ID NO: 64840 - DNA, 1838 bp, Bovine  19866880901452
  misc_feature (1)..(1): n is a, c, g, or t
nttccctgctttgaaatgtctaccttctgttgatctaactcagcatgaattgcttgtctttcaaagatcaaaggtaatctcagagattggtaggctatgtttagacatctctaaaaagtcacttaaattttatttttaaaatacaatctaaaatacaatctatattgtattttaagatgcattaatattttcaatttttcttgattaaacacatacagataaacttcccaaggcatctcaccaaagatgtgcatgaagagcaaaaaacccattgaacacacctagcacctaaagctttctccaatacaaaaccattctccaatacaaagaccagggctccttgaagaaatgtctgattctatcactgggcaggaaatatataacaagagccttgagcatcttgtatttccagaaagcaaggaagtgcaaaacaaaatacagacaaatcaaaaaatcccacacaataatgggatatgtaaaatggatatcagtgccaagcaagagttcccagttgccaaaagtggaacaatatcagctaaatgcaaaacatatatacacacataaaagtaaaggaatagtattggcttctctcccaaggtataaaacaaatatccattagtttgtacttatataaataaactactaaataaaaaagtaagtgggaagaagatacaaatttccaatgcagaaaaattcttaatgatttatgcatttattctgcccttaaaagagagagcacaacaccccgcttcttatgtatgggctgctcattgtaacttcctagtaaactgtacactgtgagaagtaaacaaaaagagtgactttacggtggagaaatttgacagaacctcagccaaatgatcaaggtcaacatcaagagtgctaagtcacgctgatagcatgtacctctgataggatattatgagaattgcccttctgtggttttcctctctgaaacccataatcccagtctaatcatgaaagcataagatagatcccaaatgatggacattttacacaatccctgaccagtactcctggaaattatcaacattacacagggaaatttcagaagtttccataatcaacacgagcctaaggagatgtgatttctcaatttaataaagtaatctggatgggatcctagaacaagaaagggacattagggaaaaactgagaaagtttgaataagattgggattcaataatataataatgttcatttagtaattgtgacaaatataccataggaatataagatgttagaaagaggagaaactgagtctggcatatatggtaactctctgtacacttcacaataattctgaaagtctaaaatattctcatatttgaaagaattataactgatcaacttaatatgaatttcagaagtttcaaattcaagcaattttcatcaaaggaagaattttctattgttttctaaaatcacaaccatataggtagcattcacgtccataaattgggtcaataacatgcagatacttaacaaattatttgagtctggcataactgagcagaaatagcaggcggtgcaatttcaagtatcataaataaaacagaaattgatttccagtaattcttctgagcacagtgtgttttgtatttgaaaattgctctaagaaaaaaactaaagtcaaaaactgacctgatatattattattgatattttaaggggagaggtagaactcccaaactacactaattggatttctttctcccctcttctctgagtcacactgaaggttactgttaagagtgtaaacagttctaggtgtaaagcccttaagaaaacaatttataataattctcttaacaaca

SEQ ID NO: 64841 - DNA, 1494 bp, Bovine  19866881136704
  misc_feature (1)..(1): n is a, c, g, or t
ngaacatacagaaatggagaccattataaaggttttaagcagagaagggatataatcagatttgcatattaaaaagatgactttgttggcttagttaaagaaaagttgaaagactttagtttaggtagagagaacagttaaggggctatttccatagcccaggaaaacactgacaagggtctgaaaaattaagtgaaagtgatagtgagagaggataaagcagggctccaaagaaaaaaggggctcacatagttctattactgatcttgtctttatttagaaatttggtgttttatccatcatagattttttcattatttttggttaaacagttatcacattgagtattatttatctttaaaaataaggcgggacttccctggttggcaatccacttgctgatgtggaggatgcaggttcaatcactaatctaggaagatcccacatactgctgaacacctaagcccttgtgccacaactactgagccttcacaccctcgagcctgtgctctgccacaagagaagaccccacaatgagaagaccaagcactgcaatgaagagtagcccctgctcactgcaactagagaacgtccatatgcagcagtgcacagacccagtgcagccaaaaataaataaataaaaaatttaaaactctatttaaaaaaataacaaaaggaatggaggtgttgaagatgcctttatttctgatttaggcaaatgagaaaattggattgccctaagatagaaatcttccctgggtggggaagatcctctggagaagggcatggcaatccactccagctttcttgcctggagaattccatggacagaggaaccttgcgtccatggggtcaacaaagagttagacacgactgagcaactaacactttcacaagatagaaatactattagaggaagaggaactttgaggaagcagatggaatataacgatatgactgtgatgtgaagctgctcacatagtagttggctttaatgtggttccccaagataaagtaacagagtggaatggattgcttagtgggaaggtgtatatgaagaaggacttctaggcaccttaaaagtacttctattacacaacacacaaatcagattcaagttagattatataaagagtttttatgctgttttcttaaactattcaagggtgggaataagagtggaccagagggataaagggagataatgactaaaatgctgtcagggttatttacctccattgggcattccttagctattcctgtacacagctatattctctctctttctctttctctctcttcctctttcccctctgcctccgaatgcctctattttgttgacacatgtgaatataatgacagtggggcactttaatgttctgttctggttctaaaagtctgagggaagggtctgatgggccctagtctcagccttcctatgaagcattttcaggcagcagggcagaatcatgttgtagaaaatgtctattccat

SEQ ID NO: 64842 - DNA, 1116 bp, Bovine  19866881475427
  misc_feature (1)..(1): n is a, c, g, or t
natgaatgtactaggtgcaattatgcacttgagttaaatcttcccttcaatattcattcccaagagaatttgagatcatccacctccccctcttccccccctttatatattctcttgggaaatggagactgactagttcattttgattttcaaggtattttcttctcaaagcagttcaataacaaggaataggcatatttccttttctatttcaacttcaagaatttgatcattaaaactatttttagttgaagtttggaagtactgcacatatagatttccttttgaaacatggctttgaaggaagtgagggtcatgtaacccatttatagcattactttatgctctctgttctgttgcaagacttccaaagaattaattaaaagttgataggattgcccctaaaaccaattatcccttctgtctgaaatgctgagtacacattattgagttttcaaataaactgaaaaaaatttcagtcaggcaatagtattatcttaatttataaacattaacacaagaaaatatctgatttgttttaaatgtttactccacattgtattatcagtattatctcttcctgcctgtttaaaagcctaccagaatacattcccaatatataacaacagtgcacaatcatacataatttctctgatattgaatagagtgttctagttgagatgtttttggaatttagagacagcatttcagcagatttatactgtgcttcaatttctcagttgaggaacccctctaacctgtttgtcttttcaatcttgcagtttggaggactgaaggcttcagggacttttgacctttaacctttaaatcctttatcttatcattctaacatgactgttccattttccatataaacatttaattttttctccctccacatatgtgcacacacacacacacacacacaataagagattaatgaaaattacaggcagcaattgaaattacttgcagagttttctgtttcatcatatcttttaaaaaaagtgaagtctttgaaaaacaatagctattatattttagtgtctttatcatggcaagaaactgtgctaaagcccaattgtaatactttcatttaaagatgaagagttaaag

SEQ ID NO: 64843 - DNA, 832 bp, Bovine  19866881926970
  misc_feature (1)..(1): n is a, c, g, or t
naattgcaagtgcatgactgtatacaaaaaagtattgtttatagacatcacacgtgtgaagctcattccttgtgctttcattctgtaactgatttaactacataaatgctattctaaccaactttggaaagtttcaaagatacttcataagatcaaaatttagcagttggtttctcagaaaaaaagataaaaatttcccctttgctcactcagtgtatgaaggaaatgtcattataaaaacttcattaatatgtaaattgcagcattttgattagcactagcagaccccttttgttaagaaaaaagacggaaggagctaaccagattgcaataatttacataataaaaactcagtggtggcagtgccaccaagtagagaacctaaagaaggctagaatgtcttttttaaacagcttaataaagtattagaatcacaaagtacaaaaggagagaaaatatttttctcttaactgacaaactctattttaggaggaaattacaggtactatagattatattaagatgatagaaatgaatatgtagccaatagtgtcaacacacacataatttcaatttagaagtgaatgtttctatcactgctgtttggggacttaaatataaaatatggccatctacttatgaacttgattttgataaagagagaaagcctaagaggagacttcagtttgttctagaaattaccaacctcatgttcatttaagggattaaaagctacatttcaactggatgtaaaaattttaaaaacaaattttaaaaaaaaacacttgataaagtaagatatttgataattcatttcatagtatatatattt

SEQ ID NO: 64844 - DNA, 1197 bp, Bovine  19866881941110
  misc_feature (1)..(1): n is a, c, g, or t
nggagtttgcattttcttagggcatgacccaccagtctccttgcttggctatgcaataaaccttttcctgctccaaactctgacatttcactttgttaggcctcactgtgcataggacacatgaatttgtgctaacagcatggctataaactggggggtggggggcgcaggattagaagttagaaggaaggaagtcatagagggagaatcttagagaactgacaacaacttccatggcctatgtaataattgaagttctcatttgtcaaaaggctttaaactagttgttaatttccagttttagacctgaaattttctgcttttgattataagcttaatttgtcttcacagcagcaggtacatttgaaatatgaagaaataaatcagatacttaatattctttcaccttttgaaagcatttttgcttatagacaacttcttaatctcaagatattttttaaaggctcattttgtccatggcttttactatgtctattacttccatagaaattctcatattttttttctccttttatgtttcctctttgcctattttattattcatttccttctttgaatgcttcagccatgcaaggtcatgcagtgatttcagaagtctgttagtgaaggacttaatttttcaaaggtaaatggagcttaagactaccttttaattggtttattttgcctctgttctttctaaccacatcctgactccacgtgttccacacagttttaggtgttagtgatgtcatgaactacaaactaaaattttggcagcaatacagagaaagagctaattctctaatagaccttgaatatatttgcaattgctaaactaatatttggtaggtgatttgagatctaaaactatacaacatatttacttaggaatagactcattcaacctgttatttaccttttgtccaaaatgaagtagaaaataaaaggctatgtgcatatgaatattgtgctgtgtacatatttcatggtggcagtcaaagtttgtagaatatttgcactgagacctaccatattatacattttgaagttcagctctatttttaagaggaaaacatatctggatgatcaaccatattataatgtggtataattggaaatttacttggaacaataaaaaaacgttggctacagatgtatgccaggggttttatattagaaatatgagcagaaata

SEQ ID NO: 64845 - DNA, 1532 bp, Bovine  19866881966940
  misc_feature (1)..(1): n is a, c, g, or t
natgcaggttagggctgcatctgactcctcataggttgaggaccatagacttgcaatctttcctggatgtcacctaagtttttattggttgattggtctccacaagggccaggagtagtacttgtaagttcctgataggattcatgttaactattttccccatccttttagttttttgtgcaggataagggcctcagaattagcccaccaaaatgtgcttatgagtaaggagaatgagggaaagaacaaaggattggcaactagccaccattttagaaatcttattcacatttcagttatatacctttttgttctactattctaggaatgaatcacttctttatttcttataacttctcctttgataggaaatactatatctttattacaatgttcctttatatctttgtattttcctatttctgaaccagtccccacctgattttctgcttgatattaaggtagagtttacagtgagtaaaatttataatatcaactctgtaaaacaagacaggcaccagatatttagttcttgaattatcacactgagctgaagtcagctcattaatcttctattttcaccccaagattccaaatcgacacacttatgccatttagcagttacagaaatgattaataggtttctttggtgctaacctaattgccgtgacactaaagacaagaacattacaaaagataaagcgttgggaccagaattacctcccttctaggtagcagtcagctgttaaagacaattcttgaactcctttgagcaataaacaaattgttgttgccaagtatggtttttgccttgctggattcaactggaagagtctcattaacatatccttatgcccagctcactgttttctatcttatctgtcgggggaatgtgtaatttccaaaacccaagactgcaagccatgtgacagaagcggtcctcctgggttcccttaccctactgctctccacccgggtgccctttcccaataaaatctctcgctttgtcagcacatgtgtctcctcggacaattcatttctgagtgttagacaagagcccagtttcgggccctggaaggggtcctccttcctgcaatagttctgtctcacaagaaaaatttgaagcatcagacaaaccagtgttacagcccttggatggaccactgttacagctccatgttatactcagttttatttagaaagtaaaggaaaatacatcctcgaggtgtgagagaatgcatctcctgcattataggtggaatctttatcactgaaccaacggggaataattattaaataacatagtgctaaaaaactacctagtccaagagttagcccttcataagtcttcaaaactgttaattgtttcatatcaagtactttaaaattctaatattaaagtaatatgagtgacatttaaatttaatgcacataaagtaaatagaaattagatattgggtgtgctagaaacagaataatttttctcattgtttaagaaatgctgtaaagtaaatgtataacatttttatttt

SEQ ID NO: 64846 - DNA, 1323 bp, Bovine  19866880508833
  misc_feature (1)..(1): n is a, c, g, or t
nctggaccttaattttttcatactgggctttggggtacttgcgagaatctgagaaggaaagaagtctttaattgcaggtgtggcaaagacaagaatttgaaagtgtctcatgtccatctattccttattatatcgttttacccctgaaattaaaagtgaattcaatatttaaatgcaaatataattaaaaatgcaaagactataacaatattaaaaatgcaaagggaatgcaaatataaattatgtcatttacctttttgacgtattttgtctgcagagacttgggctgacataatttcatcttgtttagtctgcagataaaaagataatccctgataccatgtgaattacattgtggaaagctctactgaaccgctgtatgggggaaatgtagctggacttcttactcgtactcacattatcgactagtagtaaagaaagtggaaaaaaaaaaacaacaaccgtacagtttgacctacccaggtctttcacctcgattgagttagcaatttacccctcagcatattttttctctggattgcttccttaaccattgaaagatgaagggtgcagtcggacttctgaaggatgctatcagcagccccttcttcatagtaaccacgctctgtaaccaacttcccattgactctgattgcaaagtccaagatattaaggtctgaaaattgaggttttgaattgaaaggaaaacacctcaattttaactatactgctgcgctttggctttttaacatagttctctaagaatcttttccaggagcgttttcagatttgaggttacttctgccttagttctttgagtaaaagaaataagaatgcaaagctgacagtgctgtgaagaatgatgtgaatatgaatgcatttgtgtaagtgtaatcatttccactgtatgtcttttatcaccatgatgaaaataataatatcatattacatgtttgtgttgattatggagtttaggaattaagtcactgggtgacatgctaccatcttttgctgaagaccaaactcaaatcctgctctcatttaagtggccttttccagttactctagtgttctatgaactctctaaactgtgactttattttctatccttctcacaaaatccattatgtattccactagattgtacaattcatggggccaggccaggcctgacctgttcaccctgtctcagcttccagcacaggcttggcaaggtggttggttctaaatgtctattcattaaaggaatgatgatgttgacttgcagagtcatcattgcatcgttgcatctaattacattgtgagtgtgctctcttcatagga

SEQ ID NO: 64847 - DNA, 4766 bp, Bovine  19866880468220
  misc_feature (1)..(1): n is a, c, g, or t
ntcctctcctcttccaatattctctataaaggcagcattcatgttaccagatgcaatcctgagaaatccctgttgggaggtatcttcatttcttctagcacagattgccttgcttggttctccctgaaatatttagagtggctggaagatttctctgagttttctttctttgccctgacttcctcaggctccatgcacctgaaactttgtgggatctttcttgtctctcaagttccatcccctgtttttcttattagcatttgatgaaggcttattgaaaaagggtggcatttgggtagattactcttgtttctactgttttcatagatcctaaagtgtcagtctgtctcaaactagctctttatgtatttgttaaaagttcagttgtttccttcttttcttctcctcctcttattgctttctcaggtataaaagccatattcattccttttgccctatgaggggcacctttcacttttatgatttctgttcataaaaatctgtctagtgaatgttgaaaagctttgataggttacctggcttcctcttattgttacaatgagatagaattctcttgtgatttttgtatcctatgagaaagggaaatatttattaagtaacatgaggtaccatacacacatctaaaaatcttacgattcatttacactaaatttgactgctatcttggataaggttgccagtagttggcagctcatccctgccttgttgttttttagtgtctgattctctcttgcctttattccctacccttgtttttgaagtagttattcttcccttattgtttacttaattatgtagtcaaaagttttgaaattactgttacaaatcagggtaacaatttcttaagagccatattaatctgaaatgttctttattattgtagttgttcagtttctaagtcctgtctgagtttacaacctcatgaactgcagcatgccagactcccctgtccttcactctctcccagagtttcctcaaattcatgtccattgagtcagtgatgagtttcatgggaaaaaaatagtaagttttagctacttaaacttagatgaagattaatatgtctgtgtttttgtgtcattcattggttcatgataaatgtaaagtactttttcctattaataacttgatattttgcaagacagtctcattggttggcaaggtttctgttactgataagcatgtatgtttaatttcatgctctgcaactttggtctctaacccttatttcagttctcatttttagcttaggatgtaactgaaaatgacagtggtgccttggtttaactaattggtgaagcctgaatggaatgtgtataagtgagccatttgggtcgtgaacagaggagtaaagcacacttttctcattagttgtctcccaggctaaaattaaacagaataatatattgccaagttttagtgatgtatggggcatctgttctgagtcaactcagtatcagactaattgtctgcacacttatatgtaaaacttgtgttttatttttaaaggtcttgtctcataaattgaatataatataaaaatatccctttaaatgtaaaagaatgttatctctaatttatagtttcaactaaattgttaaattaataagttgtcttttattacgtgtttagcactcatgaagttgaagcctggctctttgtcatttagtcatttttggtataatgcagttgtgtaacatgaatatttgtgggtgaagtatttaattttttcattataatatagtaagactttcaaaattaattgtccacgtgaaaaaatgtatctattttcatttgttttcctttccctttctctatcattccctttttaaagatgtgctaataacttactgggaaaatttttaaacatttactcaacctgttcagtttttagggcatatgaaaagactattaaaataacttgcctaataaggagaattctataattccgtaatttagttttttctcaagtttgtatacttttaaatttataactactttgtttatatagatttttctctgtatttttatcataattttgaaaaagtttgtacatggcttgtacttgagatgtacagtattttgttgttgttgggttgctcagtcatgtctgattctttgcgacccccatggactgtgtgtggcacactagacttccctgtccttcactatctcctggagtttgctctaactcacatccattgagttgatgacgccatccagccatctaatcctctgttgtccccttctcctcctgccctcagtctttcccagcatcagggtcttttgcaattagtctgctcttcacattaggtggtgaaagtatgctattagagcaaaactgtcctgagttcttttctggttagtggctcgaggtgacctctacaaatgatatgctattctgcttaacccagaaaactaccctaaatcttgcaaatcaagaggttcacatcttcatgttcactttaagaacactcgtgaaactgcccaggccattaaacgtatgcatatctgagaagccaccaagcatctgaaggatattgctttaaagcagccatgtgtgccattccttctggtgcctgttctcattccttggttcctctctctggatttaattaggtatatgagtgttcttcttactctattctcttatctcttaacaccattttgattggtttatttttctatttcagatacattctaaattatcttactgtatttcttctattttattaattttgtcttcacctatagcttatctgctacttgacttgtccaatgagttttccttagagttggtaggtgtgcacaggccaaacagtgggtctggacacagggttggtgacccaaaaagagtactacatttttactgcctttgcttaaaaattcagagagtaatgctgatcgtaaaggcttagatgtagattctctggtcattgagcacatccaggtgaacagagcctcaaagatacaggcgcaggacttacagagctcatggtcagatcaacccatacatgagctatcccttccacattgaggtgatccttactgagaaagatcagattgtttctaaaccagaagagaaggtttcatagaagacaaagatatcccagaaaaaactgaagaaatgaaaacttatggcccagaaataaatgctgcaaaaaataaatgcaaataaaagcaaaaaataaaaaatttgacttttacatctaaaaatcaatttattctttttcttctttatcttcttttatttgtaacacttggtatacatgaagttgttttgaagtaaaatataataaatatcattgaatatgtgctgagaagttgagtcagtttatttgcttttttacacctcaggagatgtttctatttaggattcttttctgatcttcttttttctttagtgttttgtttcttctttgtttgtttaatgtaggtttatttttgattatccagtctgggttcattggacttcttaggtgtgaggcagttatgtatgtacatatatcttggcagttatgtaagattctcagtaattaatttttatcagtattggctcttctcattttttggttactctggaatttaattagatatatgcttgttcttcttactcacttatctcttaatatcattttgttttcttttgtttttctatttctgatacattataaattattgtatttcttctattttatcaattttctcttcacatatctaatctgttatttaacctgttcaatgagttttagggggcttttctagtagatcagctaggagaccttggttcaattcctggattggagagatcccctagagaagggataggctacccactccagtattcttgggctgcctgcggtacaggagacctgagttcgatccctgggttggaaagatcccctggagaagggaacagctacccactccagtattctggcctggagaattccatgaagttttggggggcttccctggtggctcagtggtaaagaatccgcctgccaatgcaggagatgaagattcattcctcgtgtgggaagaatcccctggagaaaaaatggcaacacattccagtattccagacttccatggactgaggagcctggggggctgcaattcatgagtttgcaaagagttggacaggactttgactaaacaccaaaaccaacaataatgagtttttttacttcaacagctaaatctgtcatttctctactttccatttttctttaaaatatgttctttgctaatactttctaatagttgttcatcatgattccatactttagtattttaaacattttcaacataacttttccaacatggacttttttcaactaacctgtctatctaccctttattgtgatttcttttttccgctcctaccatgaggcaggtactttttttagatgctggagatagagttgagggcaaaactgacatattctttccttcatattctgttcgtcctaatggagctaatactatttttataaaaaaatatgtaaagaaatttactatgttatttacagatatacatgacctgccccacatatattaagaatgggacattctagtttagttaagtttatgtgagctacttttatcagagaaggacaaaaatgttttagttagtaggatgggatagaaacttgttacactgcagctttgtgttttatgtcagactgttagcctgcatttcatctagacagctctctctctttgcttctgaacatttaaag

SEQ ID NO: 64848 - DNA, 4244 bp, Bovine  19866880472846
  misc_feature (1)..(1): n is a, c, g, or t
naatacattgcagagattaaattctacaaaacccaccctcccccaatgattaatttcttcctaattttctttctatataaatgttctcaaaataaccattgtgttggcttttggcaaggtatgtttcatatctcatgatgttaggttcctaatcctataatgcatagtgttggtttcaaataactcccttttagcaaatcagagatattgggatagtaggtatttagagtagcttgcctgaaagctttgtttgaaaatactgttggcagacttttagtccctgtcgtgttctttagctgatctagtgtgaaggctttggatgtggatttggccttcaccaaagtaactgcgtcttttgtggcttcctgtagcaggatgtaggtttctatgaatgtgtttctatttgctgccaaaagctacctcaataacagtgttgaaaatgactgtaagttctactgtcatacatttcagaatgttatattaaatatatttaaccctttttattggtatttttgatgttttcctctagaaattcatgttgaaaaaaatgttacaggatgatagaattttggggggtttatatcataattttttattgtgaacttagaaagtctatcttatacttattttaagtacattctggttatataaggtacactggatatgtaatatcttatgtacattcctgattgtgggttttaattgaggcagtaacatcatcacgtgaaattataacctaaacacttttcggcttaaagacaggtgagtttctgggatatgatgagtgttcactagaaccaccgacatataagacagctctttaaaaaacagtaaaacgttgtgctaagtgttattgtaactaaaaagtaatctgaatgtttatttatttatttatttttgtattggagtatggccgcttagcaatgttgtgatagtttcaggttaacagcaaaggaatttagcgatacatatacatacatccattctcccccaaactcccctaccatccaggctaccgcataacgttgagcagaattccatatgccatacactagttccttgttggctatccattttaaatatagccgttaagtacaggtccatcccaaacttcctaactatcctgtcctcccatcctttcccttcagaaaccatcacatgcttattatagttattcaggtataccctgctcaacatcctaaatggattaaacaggagagctaagatgattgattgattgataaaagtctttgctcagctttgagtttaagaatattgtaaagcgtactgcaatggtggctttgtaacttcaatttgaggaagacccattttaccctttcatgactagtgtctgttttcagccaataccttccaatcccctccacaaatacagaagctaattagaaagcaaggtaggaagcaagcatctatgcattcatttaatatgtagaactaataataaattacacgttgtgtaagagaacttgctaaccaataatgagatgctactgccccttgtcattttaacatgagaacaaagaagctattattttctaaagtgccaatttaaacaatagctattaatacttgcatttatctttatatcttattttattctgtgtccactagttcactgccgtgaagtaaactataattttaactgttttgtatgctagaaatacttgctgtctgtttggaaactctgcatcctctgctgggaagaaaggtatttcttcaatgtgaaatacttttctggtacatcatttctcacactgagctgtgaacaaaaacttacttgaaaatcattccacattgacaaggataatgaaaaatacaaatgttgattgtaaaaatagatacaaaatagatcaatgcaaagctaattttttagctttcaaggctggtttgaacttttttccatatctttttattttttattgagttacaacttatagtcaggaaagtacattaattgtttgtatacagcatgatggactttcgcatatatgtgtagccatgttccagccacccaactccctagaaactttcctcttcctggcccatacagtatcctgcactccatagatagccactgttcttacctctatagccattgaacagttttgacataactaaatgttaaaatgaattaagttgtaaaaaatactttctcagcataatttatcatatgtaaatctactcgacatagtcaagtcagtgtcaaatcacagttcaaaataagtgatttcgatcagaattaaaaaaaaatttttaacttcagtttgtcatatcttaatgtcaaattatatattcatccactatgatattttccatgtaagtcactaatgaatataagggaaaataaaagtgtcaagtgtgaatattaaaatttttattaatatgcacctctattcattggacacattccaaggatatagcttaataactctggttataattgaggttttgaaccaatttatgaattttatttattggaacagttatttggtacagattgtcatatacattatacatgtctgtggcatttgtacattaaagaatatactgcttctcaaaaagaaataattatttgtattccaggactttattgtcctctaactgaattgaatgtcatccacgtatgggtttgataaactgacacaacagtgaaaagagtccctgtcccatgtcagcttatcaaacacactgtggacagcacgtctttggcactgaaaaagatttccagtcatttaagttctggatagaagtcacggagctcatgttcagtgaaacacaacctcagtatttccaggtgattttaaataacacctgataaaactgaggtatagtcccactaaactttaagaattatccaaaaactaggaaaaacaataatgcgcatagctacgaattacagtcattggtttagttagcggactgaatgaattttgatgaaatatacagtaattacctaatatcctgtcattctaataaacagcatttttttatactgtaaacatatttatgctgtagaaaaataataaaattaaatgctttttttcctatcctagttcttatcacaacagatatccttgtgggaaagttatccttcaatctgaattggacactaattttttccaacttcatattttatttgaaactattcattctcagaaacttagcagccatcattttgaatagtgtaactgaatcatttgtacattttccagttaagtataggcatcttaatatattcttttaaaatttattcttagtaccataagtatattctggtaaaaatctctaatttataaggtgatatagttcaaaacatgttttcttgtatattatttaactttatttacatatagctataacaaaatagttcaagctgtaacatttatgggtcaacttgcctgatactatatcatataaaatgtgaaaaaatacttttccaagtttattttctgtgcttctaacccttcgaagaagaaattagattaagcggttacagtacctcatcagtggcgctccatctctgtgctgcaggtagaaacgtagtgcatcagtgctgagcagaagctgctcttccctttggagaaaattgcagtatccaagagcttttttaacaagggaccacttttaaatgtgtatggtcacctcaaaggatatgtagagcatttcctgccagcaggattagaggaaggaagcgccaggccaaaatgtttgatgtgtgatgtactgtaattcctttcatgtgtttggtggcttttatatgttgatcaatgttctgctaccaattgtgaccttggtgtggtccaggtcattaaaatttgaccttcctcagtgtgtggggtcattaactatacctagcagcattattataattaaggatgccgttttcttttaaataaccacctctcattttcattaaaatatttatttttcataattggataaacctcctagagactgattttcatgaaagagatgattcagtgtttgaaactgccaatactaacaaaatgtagctgaatgctcgttagggttccttactttatcttgtatacctgctgtttaaatcagcattttcttcccatagtttcctatgagcatgtaaagttcacactggggactagcttttttattttttttttttaattttaaaaattaattttttcttccagttttattgagatataatttacatacagactttgtgtaagtttaaggtgtgcagcata

SEQ ID NO: 64849 - DNA, 2068 bp, Bovine  19866880563887
  misc_feature (1)..(1): n is a, c, g, or t
ntaactgttgctcaggaggcaggtcaggtggtctggtattcccatctctttcagaattttccacagtttattgtgatccaccacagtcaaaggctttggcatagtcaataaagcagaaatagatgtttttatggaactctcttatctcaataataagcatcagtttattcatctttaaaatgggaatgataaaacccaccctgtcagaattatacttaatataacatacagagctacatttaagtattctggggaccataattagcccctctcgatccagggatcaaacttgggtctcctgcactgcagacagattctttaccatctgagccaccaaaggaagcctaactttgtaatttagacaccttttaaataaactcatactgcaagtctttcacaccaaaccataccaacactagggttaagcacactcaatacatgtttgttgaaaaaaaatctacagatgaagaaagaaatacagagacgatgaaaatgaaagctaacacttcgtgaacaattcttatgtacccgagaacatatatatactctgagaaaaaatatgtatgcactatgagggaaactaagtcagtaaaataggcctatctaacctgttctctctaaagtatctcctttacaagcaattgtagagcaagtccctttaacattcaagcaagtgtattttgagctgtaatttcttctatagaaattaaagagtcaaattgcttgaaacagagtaggggacagaagaattctggtacctccataaacaaatcaagctaagaaatatataactttattaaataagaaaaaggtatttagaggaattataaaaacttctcacctgctgcatatgtttactgcttcgcttctgaggttgataaatgagccaggtgtataagatagggtcaatattaactgctagtccttggacattacaaaggagtacggcacctaaaatgcaagatttttaaattattcctcctaaaaacaataagcttgatatcattttacacctattgcagatagccataataaaaagagaaacaacaataagtgttgcaaaggatgtggaggaattatacctccatacatagttggtgggaacaaaaaatagtgcagaccatttggaaagcagattggtatttcctcaaaaagcaaaataaacagttactgtgtgtgtgtgtgtgatagtcgctgaatcctgtctctttgtgaccccatggactgtagctcaccaggctcctctgtccatggaattctccaggcaagaatactgaagtgggtcgccattcccttctccaggggatcttcccaaatcagggatagaacctgggtctcttgcattacaggcatattctttaaaatctaatctacccacagaagctcagaaagttacaatacgacccaacaatcatattcctcggtatatcaacagaactaatcaaatatccatgaaaaacctgtccacaaattttcatagccacattattcacaacagccaaaaaatgggaaaacatgaatgtctaagaatcgctgaatggataaacaaaatgtagtagaaccacagaatggaaaactatttaaccacaaaatggaatgaagtactgatacatgttataacatgaataagccctgaaaacatgctaagtgaaataagccagtaacaaaaagtcacatattacacaactgcgcttacatgaaatgaccagaacagggaaaaccataaaagaaaaagtatatcaatgcatgccagggctaggggagaaaacaaagggaaacaaatgctaatagaaaggtggttccctggagagtgatgaaaacattctaatcagaaaatggtgattgttgcacaacttgcaaatacaccaaaaaccactaaattatgtactttaaaataatgtgctttatggaatgtgaattatagcttattaactgtgtatttgtcattaaatattaaatataataaactattttattacagttttttattataaaatcataaactattttctagggaaacagcagtgtctatattggccatgagaatggaatattatctccttctttt

SEQ ID NO: 64850 - DNA, 2093 bp, Bovine  19866880568770
  misc_feature (1)..(1): n is a, c, g, or t
nttattaatatatagtagaaagattactgggattcccaggtggctcagtggtaaggaatccagagacctgggatcaatccccagggtcgggaagatcccctggagaaggaaattacaaagtagaaagcctggaatttaattggccctactatttattagcagagtgatcttagccaagcatttcacttctttgagtttctgcttccttttgtataaaacgtaatgattatagtagataccaacaaggttcattccaggtgtagagttttctcattctgtaatttggaattcatctcccccacacttacctttctaaaaaaattttttttttctctaaaaatatttaaactagctttggcctcagagagttgacatctgtaagccactactgtatcagattacagtatatttcaatttgttttaaagatgcatatttatatgcatatttgatattttagtggaccattcattagtttattcaatacttaaatacataaatttaaaaaatgttaatgaagttatttttcaaatactgatgtgaggaatatctgttttaaattggtccacttgaatgaactatccaagtcccattatcaatttagctatccagaaacacttcatgtagcacttttttatcccgaagaaagcaatgttccatgtccaggattcttttgaagccttgaaatagtaaccatgtgggtaagaaaacagagaaaatatgaataaccatagcattaacattcatggggaagagaattagtaaggtaaaggtgaccagttgcattcctggattctgaagtgaaggactatttacagtgtcttaattggagggacaaaaaagggtgtcaccaggcaactttctaagaaattaggtcaaggaaaagttaaaggcatcataagttaaaaattaaagaagtaatatattatgtctttctgtagtgttcatgctttctctcttaatactaaaattaatcctttttaataaggtaactcaagtggcagccagcccttagcagttttagcatatatatgaatttcagtgattgcccaattttagcatttcagaaatgccttaagttgttatggatataatgtgttttcttctttaagaagacaaaaacatttgatttttaaaaatttataacacagtgttgaacttgtaattgtttactgttttatgtgaaagtcataaaccattgttacatgtgctaatgttcctttgtgtggaaatcatatggaatttaaaataaacaaagaattttgtttcactctttaaaaacataccatgttcagaggataatttttcaaaaagtcataattcttttataaatataaaatgaagatgtcagagattttacttagttcattaattaatgagggaaccaataagaatgttaccaaaaattcatatacaggagacctgtaggccctgatcctctcagattttgattctcttattcagtagggtcataaaaatgataagtcacttgatcattgacttgggaagccccaagaaaagcccccatgatcttgggaagccccaaggaaagcttagtatcatttgaatgggatgatttaaggaaaactgcttgaattttgaggaatgaaataagaatactcatttttttttttcacagtagtagatttttttctgagtttccctggtgggtcagtggtaaacatttccacccagcaatgcaggagatgcaagttggatcgctggatcgggaagatcccctggagaaggaaatagtaacccactccagtattcttgcctgggatattccatggacagaggagcctggcaggctacagtctacgggctcacaaaagagttggacaccacaactgagtgactaaacaaaacaacaccaaggtttctctctagctacaattcagaataatttttagtattctgtgtaatttacctgcctgcttctcgtctgtgtttctttgtaatgtttgtggttgctctgaggtttccagtgtacatactgaatctttcacagtcaatcttttgctcggttttcaatctctgactctttgtgaccccattgactgctgcttgccaagtttccctgtccttttctata

SEQ ID NO: 64851 - DNA, 963 bp, Bovine  19866881553241
  misc_feature (1)..(1): n is a, c, g, or t
nattctaaatgaagaatctgagtctatgactttgtgaaaatctcaaaatgaagggaacagtatggaggaaaacctgagtcctggagatcatgtttctccataacttggcacctcaaatatggctccattctctggagctcaggtgaaaccatttaaaaacatgctaaagctgacaggtgtgatcagggtcttagctgtgaaattaatgaacagagcaaattttgaaaatagctgttactctctaacacaatattctataatgttttcactgccagctgatggacaattaggtcaaacagatacctaaggatataaaaaagaaacaaagaagtcagatatgtaaaaatcttatagatttgtaaaccatcagtgaaaaggtgataggttaagtatagatctagatgagaatatctagtaaagctatatttgtgaagaacaaagtatatagagaaaagagcccacaaaagatattcaaaaaagcagcaattattcacagaaaatgaatcaaggcaagtggttattccagaagttaagaatttcaaaaacgaatcaatgaatgtcaagggttaaaagtcttccattggatttccatgtaacaggtttattctgttaactgagtaagctgaaagaaatgttagcatttttatatgacaggcatttaaataagaaacataatttatgaaacaagttacttaaaaatatagtgcatagaatatagtatgcactcaataaatatttactttatgaaggaaggagggaaagaagctaggaaggaaaggagaaaaggagggagggatggttggacagagatggacaaacgaataaaaattggttggtcctaagcaatgacagcagactaaagacttatttcagggtaaggtagattcacttgttaaacaagttctttactgaaataaatatatactagatgttattcaggagaccccagtttgatccctgggt

SEQ ID NO: 64852 - DNA, 3392 bp, Bovine  19866880385058
  misc_feature (1)..(1): n is a, c, g, or t
ntccccttaaaactgagagcttctcttgaacaagaattaacctcccacattagatcagaaatctgccagataatgtgttttttctgccaatggggggcagggagtgtaaagctcctcagactggaaggaggcatttggggtgctcccccacaaatcccttctttcctgggctcccactgggctgtacacggcatagaaccagttcatttcactggtttgtgacacagggagccagttgactgccggggacacaggctcctactctattcgctggccacgggggctctggcttttaactcaacatctcttaagcaaaaccacttctggctttgtgactgccttcaagttgcttacctccaatttcctctcctgaataacagggatgcttttagctaccccgtaggagtgttgaatggaggaggaaatagccacccactccagtattcttgcctgggcaatcccatggacccaggagcctccatggggtcacgaagagtcggacacgcctgagcacagcacagagcagaggagtgctgaagggttaaacatattaacacgagaccatggttacacagaacaggtcctctggtgctggacgcttgtcctctgccctctgagaaggtgcctctcattccccagctctgctcacatctcccctccctgtcccctagtattcaactccctggacatgtcccgctccgtgtcggtgaccacagccgggcagtgccgcctcgccccgctcatccaggtcatcttggattgcagccacctctatgattatgctgtcaagcttctcttcaagctccactcctgtgagtactctggacttgatctctggaagcttctggccgcaaggccgtccctggagagaggcagctccccctgccccggtgcccttggctttctgctcctatttcagaaggcccgcggagctcccagctgtgttgataataaaagatcgggaccaagccttgctgtgtgcagggacgcacccagcctgccctagcagtgacccaggatgtccctgccctccccctccaggctaccacgttgttcgtgaaccgatagtgatacgttattattcaccgaagtccatgcgttatgcacatttccagtttatgcctaatgacctttttctgtcccaagatcccacccgggtcacggtgttacattcagtcatcaggtatccctaggctcctctcagctctgacggtctccttggacttgccttgtttttgatgacctcgacagttgtttttattacttttttctccactttatttttgggtgccctgggtcttcgttgttccacaggggctttctctagttgtggcgagtggggggcttctcagtggggtggctcctcttgttgcagagcattgctctaggcccaagggcgcagtagtcgtggctcacggacttagttgctccacagcctacgaaatcctcccagaccagggatcgaatctgtgtctgtcccttgcgttggcatgtgcattcttaaccactgaccaccagggaagtctttaaggagtcctggtcggatacctcgtaggatgcccctttgaattactatactttatatgtgtactccctgtttataccgaatgatagtatcacattcaaaaattactaaaattgaaatttaagacactgtagctgaactgcacagaactgtacaatctgggaggtgaatggtccccactctgccagggaggaggccggccctaagaggctgcttgtccagcatcatagagtcagcagttaccgagccagtgctagactggatcctgtgggtctcaatcctgaggtgtttggtccccgaagcaggctctctgggtctctcccagactcatgtctgcacaaggcctcacccagggcatccagtatacacggcccctgggagagagcccccctccagggcctgctctggtccaccctgctgctgtgctcaggggcacaacttccagccctctgtgcccagggagctcacactccaggagcagatagaaggagagttggctgataagcacctccagagtccctgctggccccagctgggcccaagaggttaccagttcccgggcagctctaggtcaggaatgccttcccctgggctgaccactggccccagggaggatggtcccctcccctcccctgccctctgcccctcttcttccctctcactctttgccaattccttccaggtctcccagccgacaccctgcaaggccaccgggaccgcttcctggagcagttcacaaagtaagcggcttgagtgacagaaaagcagtgagtctaaaagtgctgtaaatgcaacccatccttgcaggagcacttgctttgattttttttttatattttatttttggccacaccatgcggcagccacgtgggatttagtttcccaaccagggatcgaacctgcaccccctgccttagaaacatggagtcttaactgctagaccaccagggaaattccaggagcacttgcttttaaatcatcgagggacaagggtacctgttttattgctttaaaggcgaaggaaaagaaggtgtgggcaaaactgccaatgactggggaagccatcagttctctaataaatctcatagaggagggtgattccatttattcattcattgcctcccttatgcccaggacttcatcctcttctccttttctttacctaaattctcctggtctcatgccatgtacatgctgacagctccaagagatgtatctccaaccagacctcacctctgaatcccaggctcacatccccagtggtctgtttgacatctctacaccaaattggggcttccctaatagctcaattggtaaagaatctgcctgcaatgctggagaccttggttctattcctaggtcgggaagatctgctggagaagggaaaggctacccactccagtatcctggcctggagaattccatggactgtatagtccatggggtcccaaagagttggacacgactgagtgactttcacttttcacaccaaatttacatcaaactgaactctaggctttcttcccaaaacgttttcttcccgatcttttttatcgcagtaaatactgcccaccgtccgcttaggagagagatctgaaactcaccattctcctcattgcccatgtttaatccattagcgagttcagatgatacttggtttatctacaaacagatcttggctctcgttctgcctcccacctcctctgattcttttgctgtctaccaggaccctccagcatgggctcagtgctctgctcctgccccctgcaatcccatccccacccagcagttagaatgaccttgtaaaaacgtaacccccttgctcccaacctttcagggcttctgagaacaaatccaagcccctctg

SEQ ID NO: 64853 - DNA, 892 bp, Bovine  19866880504859
  misc_feature (1)..(1): n is a, c, g, or t
nttcaaaagcatcaattctttggctctcagtcttctttatggtccatggaatagctctataattttaccttttccagattccatattgttgaaatcatatagtatgtagtccgaattttcagacttaggtccatttttttagttgaattgtttggttttttattgttgagttttaagagtatatttgtacattttagataactgtcttttatgagatacatccttggcaaatattttctcccagtccgtggcttatcttctcgttctcttgacaatgtcttttgtagagcggaagtttttaattttaatgaagcccaacttatcaattatttctttcatggtttgtgtctttggtgttatgtctaaagagcctttgccatactcaaagtcacccaggttttctcctctgtgatcttctaggagttttatagttttgtatttgacatttcagtctctgatccgttcatccttcacttttcaacccttgtgcattttcccatgatgatccctggtggttaggctgaagatgacttgcttgcagtgtccttttttatattttccaaattttctttttttgttgttttttatttttatattttccaaattttcaacaggggatatatgttattttcatactcggggagagaaaaaatatattcttttaaaaagacatcccagctgtaggtctttcaacccaaagttctcagtgttgacagcctgctttctttcctcttcgtcaaagggccaccggggtgaagggtatgggcagctttgcagcatctacctcaaactgctgagaacgaagatggagtaccacaccaaagtgagtctttttagcaattctgccggccctgccaaccacccctcagagaccaccccgcccccacccggg

SEQ ID NO: 64854 - DNA, 2941 bp, Bovine  19866880510953
  misc_feature (1)..(1): n is a, c, g, or t
nagacccccgaggactgcaagaaaatccctgcccgaaaccctgttgcgatcagagggaggggaaaactgcttccaagaactgaaccgtgagccagttatcaaggggatctgctcagaattcataaaacttttaagctgagaatttaatttagagtgatcccaatggacgcaaatgccaattctctccggaggaacctgcctttgttagaattcagagaattcccaccaaaaaaaaagtgtccaggaaaatgagcaactcacagtagaaaaataactcagcacaagaagaaagcacatagcatgagcaaaattcaccaaaacaacagatggcagagacggatctctaaggactttagatactggaagtataaaaagtgatatacaaaatcatgtatttaataagcctaaataaattagagactgttttaaaatatatgcagggcacaataaattataaagaatgccaagcagatctgaaaacaaaacaaaacctaaaattccaagaaatgagaactatacaaaactgcaaaccttatggagaggtttagcaacagattagaccttgttgaaaggggaataagtgaaatgaacactagatggactgaaattacccagaatgcagtacagaggcgaacagggagaaaacaaatgaaatagtggtttaaaggcacggggaatagggtgagaaagttgaaaatactgctaaccagagtctcagaggaaaagacagaatgaggcaaaggcaatatttgaaaagacaatgagaatttttcaaaactaattaaagataatcatctacagattaaagaagtccaaagaaactaaattcacacctagatacataaaaagaacttagaaaacaaaaacaaaaaacaaaacagattagcttcaaagaataatcatgagtctaacagcagacttaataagaacgaaggaagccataagccaatggaagggtatcttgactaatatcttccatgtactaaaagaaaagaactattcatcccagaattcttaagtcagagaaaatatctcctgggaatgagggtgaaataaagacattctccatcaggcaaaagtgcttgtttcccaccagcagactctcattaaaggaagttctaaaggaaataattcaagcagaaagaaagagatcccaaatgcatgctctgagatgtaacaggaaatgaagagcaccaaatacaacaattaaaataaaatatggggtctaaaaacaaccaaaatttaaaatatacgacaacagcattcgagggaaccaatggtgttaaaatattctaaggtctttgtgctatacaggaaacaaagacatgaattttagacaatgataacctaagcagacccttttcatttttagataaattgtcaacagattaaaaaaaaaaaaacctctgcttttatttttgtatcttcccactagtaatgagtgggaaagtgaatgagaaagaaaatacccaatcaatccaaaagaaggtaaacaatgagagaaatagaaacaaaacagataggacaaatagcataaaataagatgggagatgtaagtctaaagatattatccattataataaatgtaaacagagtaaaggtcctgttaaaagacaaagactgccatcttgaatttttaaagaatccaactaaatgctattgacaaatatatttctaagacaaaagattacagaaaagtcagttactatgcagtacatctgaaactaatattataaatcaattacagttcaattaaagaaaaactgaccatgaactagctcatatagcaaggctcaaaaaactttgaaatatcaatatgatattgattctctagccacaatgcaatacatatacatgtaaaaaatatttaaaatataaaaacttataagtaaaaggatggaaaaatatataccagatatattctacaaaaaaagaaaaagacctaagctttccatgttacagaaatgtaacaaaactctctagcatacaggtgggagatttggggataaaactctgctctgttcaggttaactagtcttgtgacttaggaagggcttccctggtggctcagatggtaaagcgtctgcctgcagtgtgggagacaaaagctgctttctctctctgggtctgtatttctcatctataatgggtagattggactacataattgctaacattttgtgagtgcagacagagacaggtaagaattttaaggaaacggctaacacagcagttcttatccagtgggacaaaaagacacatcagcgtccactggggagattcttcaaagagcaggttacctcctgttcttacacatactccttgaatccagagagattatggtatgtttacaaaaacactctttaaacccagatcttgccacctacctcttccctcttcctaaggcaccgagaatccccaaccaggaaagaaaatccactggcattcagattgggaatgccagttctcaaggtgctatgacccccatgggaccaggacaaggaaagaagcaggaactatgacagtgccattgccaagggatcccagtgcccacagaccactgggacatgagcttccattggcaggagaaactccctggccctggaaccttccaacagtttccagggactccaggtaagactgaatatcatggttccatgttcgggcatccccgaacccctccctgaggcttgtgagagaaatccgaaacaaggtgaaagagatgactttgtttcatcccacactccttgttctgtggcctctggggaaggacgaggcggtgcagggggccccaaggagcgggttcagactcacccacatccggctcatgtcgctcaattcacttttgtatctcagagagtccttgagaacctggagagggaagacaaggagaggagaaagaggatggtgaaagccgggcctgaggtggggcagaggaggg

SEQ ID NO: 64855 - DNA, 855 bp, Bovine  19866880851761
  misc_feature (1)..(1): n is a, c, g, or t
ntgcgcagagttgcagaaagaaaaatgggcagaacccattggatgaggctgaggacagagttctgagatgagaaaatgttgagatcgctggttaaggtccaagcagaaaggcgttgaatgccagccaaggcattccaaccttggcctgtcagcagtgggtaacctctggagaattttgggcacaggagaggcacatatgttgcctctttcctcctttagttaagggtccaaacaaaagtgatactagattctcattaatcattgagcagccaagctcccagcccagaaacaattgttctcggttctttgtaaagagcacagaccctggactgtggagcaagaagaaccttacccaccccagggagttggcatctgcttcccattcctgctgaaggccagagtagctatttgttctgactgtgaaaaccccactctggtttaaagttctcattctgggggtccttagttccagggtagacctcgaacccaacattgcagccacatccttgaatgagccttggaatttccttgcttatcactgaatgagaaaaagcagattatagtttatcccttttcagcgtgtttcttaaccttttagcctcatgtgtaaaatgatccttgagcatcctcatcaaagttggaaataattcttcaaggtgcaggacctagcatagtaagtcttccatgtgtagtggctgttatgagttgtgtcccactctttgtgaccccatggactgcagcacatcaggcttctctgtccatgggattctccaggcaagaatactggagtgggttgccatttccttctccaggggatcttctcgaccaagggatcgaacccagatctcctgcatt

SEQ ID NO: 64856 - DNA, 1535 bp, Bovine  19866880867737
  misc_feature (1)..(1): n is a, c, g, or t
nagaagacagacttaagggaagcagggagtcggtgacccatggctgggggaagggagggggagtatccaacagcgtccatggtgggaaaaatcagaaatggggaagcagctggcattggagggtagtcatctcttccaataagatgaagttagctctgggcagggaggaagaatcaagagaacgtggtgtcctggaattgaaggtgggaaagggttctctgatcgaaaggagggcagaggtgtgtgaaaagaaaggacaggagtggggggacacctcaaggaagaagccaggtgggaaagtgggtttaaggttaagggagggacttccctggtgctccagtggctaagactccaagggtcccaatgcaggggtcccaggttcaatccctggtcagggaactagatgccacatgctgcaaataagatctggaaagtgaaagtgttaactgctcagtcctgtctgactccttgcaactctatgcactgtagtccgctaggctcctctgtccgtgggattctccaggcaagaatactggagtgggttgccattcctttctcctggggatcttcccgacccagagatggaacctgggtctcccgcattgcaggtagattctttactgtctgagccaccagggaagcccaactaagacccagagcagccaagtaaataaataaataactattttaaagagaaagaaaggttgggggacacatgggcatgtttacaggctgagaggacagacggatgggagggaaaattactgaagacacaagagagagtggggataatgacagagcaacgtctcagggacaccagctgggcaggtcaacctcccagcagcgtcctgcagcctcgccaccctggctgcttcctccgtgaaaatccccacctcttatcacacaaactgctgcaaagccacagtggcccgcccgaaattcacatgcctgtaacttttggatgaaactacaggaatttacacttatcctaatgacatctcataaactgtctttatgaccatctgttccagtacaaagaccaagaaaacattaaaccctgtccgggctttgccaaatccctcttcggttcagctgtagcattgggtacatgccagggagtgtgaaaaaaacactgtccctgttctcaagatgcttacagtggagggtggagacaacacaaagacatcattttaatacagtttcaatattgtgacagatgctcgagaggaaggaaggggggcagttcccatcgcccaagaattggctgctagaacccaaagctgagtgaggctcaagtggtgatatgagctccaccttctagagacagctcccaaccagcctcctaaaaggcacccagaccaccaggctgctcaacaaaccaccaaggcacgtgcaggatgctagggctgcccggaggaggcggtgtcactacccagcccagggctcagggtccacggtggctgagtggagttctggaagatgaccagaatccaccctgctgaaggagagcagcaagcgtgttcttggaaggggtg

SEQ ID NO: 64857 - DNA, 1264 bp, Bovine  19866881078138
  misc_feature (1)..(1): n is a, c, g, or t
nacggaagtgcccagtggaggatttctgtcttagagcctgaagaactcaccctggaatttagagcccccttgtggactggccaccatctctctgtgctcctctccacctgccggctgccctgtgttccctccgctccggacagaccacactgagaaagacaggagactatagatactcaacaactgataatcccagataacctcccctgactgcgggggtgctttctgtaatcttctccaaccttcaagtttcttttactaattctgttttgctgaagttaatgtgagaatcggtttgcctggccctgaactcacaatagaagcttccagaagtggtcagaggacagtgggacgcctggatagggttcagaatgtactggggataagcaggggctacactgcctgcctggtgggggtgtcaggttgaggaccgccagcagtcacgccctgggtgtccttgccccagggagacgatgtccgtggtacaggctgtgggggtggggccctccttggggtcccaggggtgggatggaaccttccctctaatgacgggtgggggggtgttctttgctgtgagccagccgatcacgggacctgtgtgtgtgtgtatgtgtgtgtggttgtgagcgtggccacactccccagggagcatgcaggcacccacaccaagcagaatccagcctgttgctgccggagttcagtgggccttggtgtgcgtgatgtccgctgtagagctcgctctcagggtgccctgtgctgacttcctctgcctccctcccagaaccccaggttcccaggcaaccttcacatgagtgaccggcagctagaggaggctggagagagtgacgtcaacaacttgtaagtggcccacctcacgccctggacagaggggttcgggagcttgtgtaggtctcctcacttccggttagggtcacagagggcctgaaggcagggccggtagccgaggtggggacagagccgctaagtgacttgacctaggggccacttactgctggtgcctcgcccagaacccttccagggtgtttcctgctccaggcctcccttctctgtgcccctctgccctcccaacacagcgtggaacctgcccgctttctctaccgctgtcactgttgaattcgccctgcttgatctcccaacagccttaatatccacttaggtgggggctgagactcagagctggtatgtgtgttcatgcgtgcacacctgtgcacacatgctttggcggcagcacaggtacactggc

SEQ ID NO: 64858 - DNA, 1353 bp, Bovine  19866880169105
  misc_feature (1)..(1): n is a, c, g, or t
ntggataagaaagctgtggtactatacacaatggagtattactcagcctttgaaaagaatacatttgaatcagttctaatgaggtggatgaaactggagcctattatacggagtgaagtaagccagaaagaaaaacaccaatacagtatactaacgcatatatatggaatttagaaagatggtaacaataaccctgtatgcgagatagcaaaagagacacaaatgtatagaacagtcttgtggactctgtgggagagggaggggtgggatgatttgggagaatggcattgaaacatgtataatatcatatgtgaaacgaatcgccagtccaggttcgatgcatgagacaggatgctcggggctggtgcactgggatgacccagagggaggtgggagaggggttcaggatggggaacacatgtacacccgtggcggattcatgttgatgtatggcaaaaccaatacaatattgtgaagtaattagcctccaattaaaataaataaatttattaaaaaagatgttagaatgtagtaaaaatataaatcattatgaaaagtctatagaaacacatatctgtaacaattgcagcactaactgtgtattacatgcctgcctctgttttaagtactttacaaatattattccattagcttgtcaagctgtcctcatgcagtagataatatgttcaccctgttatacagatataccaggataaataacttgtccaggatcaaagagctaggcaatgacaaggtaaggatttcaaaccagagtgtgcagtacagaatccaagttcttaaacactatgctatggcttaaactgttcacacacacacagataaggactggaagataacaaaaacatttaaaaatgattatcttaaggtagtgggaacatgaatgcttttcatcattttttaaattgcctatattaaataatttctaaacagaaaaaaggaaacgatgtaaagaatttgatagttaaaagaaaaaaaaaaacagcctagcttcattcagtaaagactaaagtggactgcgtagcatatgaattttcaaatcccattttgagacttattacctaagacacatctgttattgcaggtcatatttccatgatttgttaagactacacaaaaatactattgctaaagctgtgcattctattccttttatgaattttcagaccaagtaacatatggtgcatctcttataaagtttaatctgaattagttatttctatgttcccaccccaccccctccaacccaaggaatactgtaaatgtatttctaccactcaaagttaagagtactgctgctgctgctaagtcgcttcagtcatatccgactctgtg

SEQ ID NO: 64859 - DNA, 1953 bp, Bovine  19866880768806
  misc_feature (1)..(1): n is a, c, g, or t
ncatcagcagcacctgtagcttgctcaaactcatgtccatccagccggtgacgccatccaaacatctcatcctctgttgtccccttctcctcttgacttcaacctttcccagcatcagggtcttttccaatgagttagttcttcgcatcctatggccaaagtagggagcttcagcttcagcatcagtccttccagtgaatatttaggactgatttcctttacgtgagatagtaaattaaagaagtaatgaggtttgtttacacaggcatctcagccccaaattgccaatctctggcaatagggtgtccttctaattccagatatagctagggcatctttcatatgggagatttatttccttctttcagggagacagaggatggtcagagtttccttcatcagctgcttcttaagcaacttcagttcaaaataatcaatatgccactgtggcctagtgtggggaatcctgcccggaacccagcataaatagatatgagatataagatagattggaggaatttcaaagatagggaaagtaattaaataatttataatttaagattttctttaagtttgtggttaaagacaaattttcctgttttcaattgtgttatgattgtccctataattttaacatgagtatagagttaattcagttctctgcagtgaaatgaataatacaggaatttctaatttaaattgtgaccattctgacacatttccatttacttttcaaaactgatttttattcataaaacataatatatctcttcacgtgattcctgggaattattctcaggccctatcttcttaccgagtcctgccttccttgtacataagctgccattcttgctgctcctttaggctgacacagttgaataaaaattatcatagtgatgggattggttctccatgccttaagtaaatattggaaaaagccacacggcataaaatgaagctcatgctaaaaatgtacaagtggtacaaagacaggagcttcccaagtggctcagtggtaaagaattctcctgccaatacaggagacacaaggttgatccctggggcaggaagatcctctggaggataaaagggcaacccactccagtattcttgcctggagaattccatggacagaggagcctggtaggctatggtccatggggtcacaaagagtcagacacaacttagcgactgagcatagcagggtacaaaggcagacatgaggacacacggaattctgggaagcaactagctagaatggttggatatttttgaacagcaatgaaattatttgtagtaacaaaggacttgccaatgtagtgagaagttgtttgaaagccatttacttagtcaaaatatttttagtattatgaagttagaaatatataaaaagtggaggaagagaaattcatgatatagacaatatatatatatatatattctatatacatatatattctctattcccatttaatattcttgtcttagaagaaatctttcatttaatggaaggtgaaaaatctagttttaagtaaataaaattaatgctgattcaattattatttatgttggatatccatatttagaaaactttttattactctgctttatttttaccactcattgcaggtacagaaagcttaatatttcaacataaaatttttcattcaaacacactgatatttttagcaatattttagtaaatatccaatttttagcaaggagtctaaatggtgagaaaaatcttatggtgatattctcttatattgaggtgagttttctcctttcaaaattgtgtttgcattttttggcttgtttgatttttcaatatccaaattgtttttgagtagagaccaaagcagaccttacgtcatgctaaaatttcaaactatacttaactgagtaatgatggggtatgtgtatacaattaatatattaatatattatattaat

SEQ ID NO: 64860 - DNA, 1622 bp, Bovine  19866880814446
  misc_feature (1)..(1): n is a, c, g, or t
ntaccactgagccaccagggaatccctcttagttcccccaaccagggatcaaaccctggaacctcagccagtgaaagcatcctaaccactggggtgccaggaaagtcccagaaattgcagttttctaatgtgactgctagacggggtgtcaacacaatttcaaaattgtccacaatccaggaatgtttgcagcattgaaatcagtgtctaacttaccatgaagaatgcttttaagggaatgttcatgtgtgcctttttaattaatcttttttaagcaaaaatcatatagtactaaccattccttatcctacaaatttcaccaatattagttcattaagctacataactctaggaggtctatactgtcattaactccattttacaaatgagaaaactgaggtcaaataacttattcaaggtcaaacaacaagcattgtgtttcagtgatctcccactcaagttcagctccagagcatttaatatgcttctgtgtggcattgattttactgttttatggctatgcctcctatgcagcatgaattcctagggtgaacccctgcctcccaattcatgctctttcccaaatctgggtatatcagacaagttccatcaagaaaacaggtacttcaagccagaagagatttaatatagagaatcaggagcttccaaaccattagaagagcccataatgcagaccaggaagggctctggaagtcttcaggaaactgggaacctgcagacacgccagcagtctgtggatgcctccacacagcacatcgcacatctgccaaagcacacgtgacttttgcatcgactggaagaacacaaagatatacacaagtatattctcccaggtctgattagaggacttctaaccagcagtcctgcgagtaaacattctggaaaaggtagctcccatgtatatagctcctgcctgacaagggagaacatagaaggcagcagtgatgctcgttgctgacagacaggcctgctggaagtccgggaaagtttgttctaaaacgatcgatactatggctcactaagcaggccagataatgaaaggtctatacgttagcctcagcgtcagggaatcaatatttattagttatttgtcctggaccaccaatggaacaggtgccatgggagatgttagatttacaaccaccttccatattttaatattgatttgactataagtctgggatggccaattcctccctctttaaattcaatacaaaagtgtgtgagtcctaatcttaagcaggagtgaataaatagaacggaaagaaaaatggaaacatgtaaattggtttttctcttccctcattctctgtgtgactgctttcaagccacatttttcaaagtgctatttctcatatttaaaagcacaagaaagtggcaaagggaaatgcctatttttaccagcttttaaagagcacagaagttaaagctttaagtatttatggttttaattttaggctcagatgcaatacagtgacctagaaaggctaatgcttcatggtataaagtttgaaaatattcagctgaatgaatattcagctggggaactccctttggagatggaaaaattcatttgttaaattggactctgtctctgattt

SEQ ID NO: 64861 - DNA, 4297 bp, Bovine  19866880866752
  misc_feature (1)..(1): n is a, c, g, or t
nttgaagaaacataaataactttatcccttcccttcttgcagtcagaaaaatgttgtaaacaatgacaaatcaccgttgcattttagtttatgacaccctgatgccataaacactcatagatgtggaattgtgaatttccagacaggaactccaggctgctagaagggatttgaatcattgcctggggagtgggtcctgctggctttggtgctattttgtagatgatttatggacattcagtgtgtgtacaactggatgccagcactggccaccttgatcctagttcacacctaagtatctgtttgcggttccatccctcatgtattttgtgtttcacactagtgggagcagcccgtcctctttacagatggatgagtcagaggtcaggccaatggggcaatgcctcctgctctttttttttttttctatagcttttctacagccacttagattcactttttctgtgacaaaaatgtaatcttaggtaagaaacttgctttgacgcattctatccacctccacgtcctgtggttgaagctgggtcagcgtccttacatcaactgtcagaaaatagcatgatttttctaaagtgtatggaaaagaaggaaaaaggagaaagaagtgagtgggaggagaagtagcacacgggggtcagtacagaggcacactctttgaaagggcaacaaagccggatgttctgcagacacgacaatattttacacctcaacattcagctatactaaataattccaaggatacatttccagcatatctgagtaatttcgctttgcacatagatatttgggatctgacagaaagtcagtgatagggatattgattcctaaagtagaatttatccaagaggtttcttcttagtctctacaacatcaaatcttacaaaattttagctatcagtgtcactagatcatcatatttctatgtattcccaggggtctacagcatacactaaagaaaatattttaggaggctttctttgcagaaaacccaaaatgaaacattcatgagagctatgcatgcttagaaagtatgtggggtgctgtcgaaacttacactttaagtgacaggtctgcgtcagctcagagtaagctagcaacttcacacgcataggcaaggtcttggaaatatttgtgctttcatattataactattagtcttatcaagaagttagtgtactcatgaagagtaatgttgtactccaaatttccttttagttacctatgaagtagtgtggagtatgcctgctctaataccttgtttgccaaaaaaacatcccatggaactacatctgaatatgaatttctatattgtttttccctctggttgtttaaaaacggttaaacattcagagatgtagggaagcacttacttggattcctcaggacacactgtctgttttgcatttttcagaaaattcaggcaaaagtaggagtaatttaacccttttattcctcttaagtgtaataacatcaggcttcctctttctgcttaatgggacacattggcgacaataactagctaatacttattaaccttgtgccatgtttggtagggcttccaggtggcgctagtggtaaagaacccacctgccaaagcagaagatgtaagagacatgggttctattcctgggtagggaagatcccctggagaagggcatggcaacccattcccgtattcttgcttggaaaattccatggacagaggagcctggtgggccacagtccatagggtcaaaaagagttggacatgactgaagcaacttagcatgtacccatgcatgtgtggtaaggtaagctcataaaacttccttaaggaaaggaaacttgccttttatctatctggggactcccaaagtgctagacacaactgcttgctcaatataaaaataagtattcttataatactcctattcaggaaggcaatactcttttaggaacactttcttatcataaacttccttaaaataagtatgaaatatggatatcagggcttccctggtggctcagtggtaaagaatctgcctgccaatgcaggggactcaggttcgatccttggtccgggaagatcccctggagaagggaatggcaaaccactccagtattcttgcctgggaaatcctatggacagaggagcctggtgtgctacagtccatggggtcgcaaagagtcggacacgacttagcgtctcaacagcagcagcagaagcatcgtatttcttattatcagagaaggaaagctcagttccaaaaatacaaagatcagtatgttagatatgcaaggttaaaggcattcatatctgtgatggaaaagcggacagaggggaacacagattaggttcagtggtgcaatgagggagggggttaagtttttcttccacataaaagcagggcccctgggaagctgtgtgcccataggaccgtggataaagcaggatgtggttctaagaggggatggtaaatgaacaggacaggcttttttgtccttagcaattacttcttcaaacagttattcatcagctggaggaggttggaaggcaattcctgaagatcaccttgtccttctctaccggtggggagattccacagtgtcgccttgaagccaccccccctctgtcgtccataaactgtccgtcaggtttcccttggtgggaggccttcaagcattctcctctgatctcaggaacttcttctgcactacaacttcctaagacctcttatttctttgctgatacctagaaaaaaatacctttaagaaggtgtaggtgtgttccagagagacagttcatacggggtttaacctgaagcctaaataacactgtggtgtgaattgattttagcccaaacttaattgggtctgacagtctgtaaatgccaggtcaccagttcttcagtgtggagtcagggaagctgggtaggcctagtgatttctgtcaaggaggaatgctaaaagacccagaaacagagaggctggagaggggcagtgaggaagagagagagctttgaatatctgatgattttgccctagagagcccttgttttccttccatcaagcaggacagacagctgacgtgcattaaggggatttttgtcaggctactggaaatggcagcatccttacctcacataatttatgaagagcacttcggtttatatttgacactgactttctacactgctcaactcctgaggtcccggagtgtgaggtctgtccatgtcctgctgagcacaccgggtccccactgagcagaagctgcacccaggtctccctggagtcggcctccttgttcccagtcacttggcagcttgttggtcttaccatgatgcatgcaaatatcaccagggtccagggaaagttatagatacacacttgggacttttctctttaatagagttttccatctttggaaaaagaagtcttttttcagatggccaaacacgggattgaaggtgcacattcaaagccaagtgttttgtcgaacggcagctgaaaagccacaaattaaattcatgagtaaaggagcacacgtctagtggtaatttcagatggaagtaagcaggtaattgtataagcatgactgtttgaagagcaatgaaatgcttcttttacttcctgttaaaatgctatttgcttttcaagcacattctccaagtaggatgtgaagaaacaataagttctcattttcatttaggttgtgtactctttgaataaatgcataggttccttttttggcctgaagctgataaaaggcatcattagcataatcatgacataacaatggcaggaataggaataacgctcctctggaaggggccaaggaattttcctaggtagtgggtcagaaatcctcccagtatcacggtgatatttttaaggatgtatgcttaacctttatctgctaatttattaatttagacttcactgggtcttagtagcatgtagatctagttctctggccagggatcgaacccaggccacctgcaatggaagtgtggagtgttaaccactggatgctggttatcagggaagtttccatggtgacttttgttgagggggaaattgagatctgaaggtgatgtgatgcagggacactgaatactgcagaagtccacacagcgccacaaaacccaagaggggcctcaagttccatgcagcatgggaaccacagccacctaaccctttggcactatccacacagaatctccctccttcgagaaacatgctcttgggtgcctactgtttccctctttcctcctagctccgtgttgcggaagctgcaggg

SEQ ID NO: 64862 - DNA, 945 bp, Bovine  19866880936416
  misc_feature (1)..(1): n is a, c, g, or t
ncatcaaatcccccagtatctggaatggtgcccagtaaataaatatttgttaaaggaaagtgaaaatgaatgatgatgccacagcttcattataaaaatgtaagcttagtatgctgctgctgctgctgctaagtcgcttcagtcgtgtccaactctgtgcgaccccatagacggcagcccaccaggctcccccgtccctaggattctccaggcaaggacactggagtgggttgccgtttccttctccaagtatgaaatgttttaaattccagattggtttctggcagctatttttacatttattggccactttccctgtttgccgataatttgtggtcagcaaataaaaaccagtgttaatattagcctgctttagacacaattagaaaggaaagtctgcaagaagtaaaaatactatgctttccaaaatcgagtctttttcttagagtattgcaatgttctcaaccagaggcaatttccccagctccccacccagcccccaggagatattctgcaatgtctggagatagttttcattgtgaagatggaagggattctactggcctctggtgggtggagacaggatactgataaatatactttggtgcacaggatggccactacaacaaagaaatatccagcctaaaaatgacaacaatgttaaggtcgagaaaccctggattttttgaatcagggtctgtttatttggtgcagacatcaagagatggttttatctttgaactcttttagctctcaaaatctgtatttttattacaatgaatataggtgtctccttaataaaatgaaatacattaggaagtagggaggagaacatgaattttggctcttgaacgaagtatgctctgaagagttagccatttgcctgctgctaaaatgagatgaaatattgaagccaaatttttttgttttctttccagaagggag

SEQ ID NO: 64863 - DNA, 1623 bp, Bovine  19866880942196
  misc_feature (1)..(1): n is a, c, g, or t
ntttaaaatctgtgtttccttgcttacattatattaggcttaatgctaagaaatttgacctctagaagctgaatattgtcaattcttgctgctcttcttgctttgatgtcctttccctaactcttgggtgcttctttgttaactttctggatatttcatggccttccgtgtactttcaagcatcaccatgttttaccatgtttccatcctcctgctttatgccataattgatgttacctgtatcccactttggagaaggcaatggcaccccactccagtactcttgcctggaaaatcccatggacggaggagcctagtaggctgcagtccatggggttgctgagggtcggacacgacttcactttcactttcatgcattggaagaggaaaatgggcaacccactccagtgttcttgcctggagaatccaagggatggggagcctggtgggctgccgtctatggggttgcacagagtcggacacgactgaagtgacttagcagcagcagcagtatcccacttattttcagctccactggctgctactgggtaccaagtaactcatttcagaaactcctcgatgttaaagatttcatggatgctgacagattcacatcttattttctcagataatatatgtgcatgcatgcgtgctcagccatgtccaactttttatgaccccaagcattgtagcccgccagactcctctgtccatggaatttgccaggcaagaatactggagtgggttgccatttcctactccagaggatcttcctaacccaaggattgaacctgtgtctcttgagcctcctgcattagcagatggattctttaccattgtgccatctgggaggcccctcagatggtatatacctagaaataaatgtggggttgataaagctttcaggcaaaaaaaccacaaacttttcagaagccagagcagcccagtagggaagcccattttgggaagaacacctttcagatcctatgtataagtagctatctacaatgtccatgctacctcctgccttaaacagtgacaattcagcaggtcagagagaaatctgtggcctaacattctttgaagataattctaagactggataaagttggatagaattaaatcatcatccttgacactgatttaaagtatttacttcctcttagtaggtgatgatttgccattctgttttccgtatctgctaaatagtcatttgtaaattctttcagtttagacaggagaacttgggtctggctccatctcaagttacctcttaatttttattgtgaaatcatagaggtcaatgctagtaactcaaaaaatattgaaaacttttacaggtgatgaggagtggggatgtctttagatttttctataataagctgttatgagaacagttttcagaagcattatttatgggcaaaagaccattaagtagcaaatgttagggtgccagagtatattttattgctcaaaggaatatctgaacatgaataatgtgattaatgacatacaatttactccaagagtttttttttttttttttaatctttgcatagaatcataaatctgggggggggtgtctcgagcagtcattatttattcttcactttagataggagg

SEQ ID NO: 64864 - DNA, 2378 bp, Bovine  19866881129593
  misc_feature (1)..(1): n is a, c, g, or t
ngtatttgtataaaaggattcatgtgtctgggtctcctttaacacagcaattctttgaagaaaatattgcttgttttttccattttacagattggcaatctagccaaatgatggagttcattatttgccaaggtcacacatctcatagatggtagtgaggaagcttgggatttccaggtggctcagtgataattactttatctgccaatgcaggagacatgggagatgtggatttgatccctgggttaggaagatccccctggaggagggcaatattcttgccaggaaaatcccgtggacagaggagctgggtggcctacagtgcatgggcttgcaaagagttggacacagttgagcgactgaacatacattaagcttacaccacaaaactccgtttttcaaccaatatgccaaattacctcattttatcgatgcatgaagatgatgagcctcaagtatcttattcagtaaataataaaaactaacatttattgagtgcttcctgggttccaagcttgctctaagcatattacaactcttacctcatttaatcttcatgttaatccattaaaataggtacctttttaatccctattttccaatctaggaaagtgaaatacacagaagttaaactaattcaccccaaaccacacatcacaaagtgatggagccaaaactagaagcaaagtatattgctccagagtatgtccttttaattgctacatataatgccttttccccttgttttaagaactggttgcagaagaggaatacaagtctaatgcattttagaaagatttccaataaagttaaccaaccaataaaaatggaatcaaaaaggaagttctggttgattaatttaatgacggttcaaataatcggatgatccaattcctgagcttctcgtttaattgagtttccactgatttcaggccattctgttcagagagaattctcattcatgggaagttaaatttatcttcattggtaagaaaggcagcaaaaccttgaaggatgctgctagaaaactctccctttgaagcattatgcttttatcaaggatttgtgctacaactttgaagattttcttttgagtgatattcataagaaaccacaattgtgcataattcaaatttgctaagtaagagtccttccatttcaaatgtgtttcttaatgattgaagcagacattttaaaagcattctccagctcttggtgttatagaaatcctaagtcatcatcacttctcctctttgtaggatagaagatcccccaagcttgtaattaatgaaccattaaattcaggcatacggatatgatatggttttcaaatgggaaaaatgggagtgattaaacttcaaagtgatgacattttaccatatcttcctaatgggaggcactcaggcaatgtccttcaaatgaatgaactaatttttctaactaatttttgttctttgaatgtctttagctcagtaaatacttagagtatctttattttctttccttcaagttctattttttttttctcttatgtaatctcctactctaggtctttattttttaagtacatgcttatgtttagtttgtgtgtgtttgctcaatcatttcagtcatatccaactctttgtgaccctatggatggtagccctgcaggctgttctgactgtgggattctccaggcgagaatactagagtgggttgccatgccttcctccaggggatcttcccaatccagggatcactcttgacaattgtaaggtttttagtcccgccagtcattctctcattcattgctcttctctgcttaaagcaatgattttttgttcctcatgagtcctccttccttctcctgttttaacatccattttatcttcctttctgagcatctttccactacccacatgcccaattggctttctctttttagtgagaatacaactaaaatgttactgccaccagaaaaccatcccttttactagtgacatggtttgaaaattcagatcctccagggattaactctcatccagtgctcctgttccaactcttacacttctaactcctacactcaaagaattcaatttataaagtcaacagtaataaaaattttaatttactcattttccaaaactacttatttagtataaaatatcaatgtcctccagccaaagaccatctggaatactaagataattgaacaaatttgtgtttattgcctctctgcaatcaggaagaacacacaccattagggactatgaagcattttgggaagaagatttcagaatggacgtctatgatttctgaaagtgttaggtgatttggaagagggttgaaggcagcgaggttaattactgtcaggaagagggggtaaatctgtcatc

SEQ ID NO: 64865 - DNA, 1565 bp, Bovine  19866881191962
  misc_feature (1)..(1): n is a, c, g, or t
nacccaaaaagttcaggctcatctctaaatattaacagcagcagagaaaaccctcagcaatatccattttgctgtgacaatcgaaatcccaagcagatgaatcaaatgagagcagacctcgtggacatcctgaagccccgagttagggtcctggaccaaaattctcacctgtgctcagcagttatcaaggagacctaaagcacacgtgcaactctccagcttgcttgctttcccgtccttctacagaagcttacccaggagaaatggtatttggtttggtctgtgtgactttttttgtaaatggactggatgcctcaaagctcacagtgagggtcttttttttttttctcctaaatccccaaataaacaataacaatataaataaagcttgctttcgcagatgtctggaaacttaacatagctccatcctttttcctttggtgagtcataagatggtttcacagtatctcaaaagctgttttctgtgttgctgccaaaggcattgacaaaaaatagactagctcttagtccataatattttctacattttacatatttcctgtttttatgggcatgtgcaatggagaacagtaaagacttaagacatttgcattttgttatcctttttaaaagagagaagagaattaaaatataccaaagcttttaaatacatagcaaatgaacccatgtggttttcctgagatttgaataaagctaaatactttaaattgaatgactagaaatcaagttttgaagtagaaagaggggaaaaaacttagatcttaaagtactgcataatgttacttatgtttttgaagtgaacatgcagtgaacacgaggcacaatcattttctataaccttctcatgtcaaaatatactccacaaaatgttaaacattgaaatattaaatgttaaagttactttaggagagactacaaaaatttgcaaaactttcatgtgacagttttcccagaaatttttttgtctttgtttaatttgttacaatattgcttctgtttaatgtttcggctttctgactgtgtggcatgtgggatctgagctccccaaacagggatcaaacccgcaccccatgaattgaaaggcgaagtcttaaccactagactgccaggggagttcctccccaaaactttctacttaacttggagcacatttaatcttcccaccagtctgctctttacttttcacatttctaaatgtgtcttcatttctattttccaaaatttctctcccaaatatctgtaaaccagttctaatataggcacctgtaccatcaatctcttctaagttgtttattttttaattgcttcatttttatcactgtcttttggttcactgagagaggagtaaaacttcaaattcttaaattagaccgtttttgtgggaggaaattcacagaatatgtgtttagcttctacaaaagaatcacacatctgcaacccagttgattttaaatatatcttgctgcagaggaccaagaaatataccggtatgttacagctatggttcaagctggtattaagtgccacacaagcaaaactgccca

SEQ ID NO: 64866 - DNA, 1284 bp, Bovine  19866881318589
  misc_feature (1)..(1): n is a, c, g, or t
ncaatgagaagctctcgcactgaaactagagaggagcccctgatcactgcaactagagaaaagcccacacagcaatgaagacccagcagagccaaaaaataaaataaaatgataaataaatttaaaaaaaaagaatactgagatttagagaaattcagcagctcatgagaagttatactacttaactcctagtagaatctcattaaaaacttgtggactaaatcaatgaacaaacatttaacccacacagaacactgtttcaaatgtattcaaatgttttcatggacaaagggaagaaattatatgtattttaaaggaaaaaaaaaagggtatgtgtcaataaacacagtcatttcaggaaagcatcctaaaaaataagactatttcagagcagtcccaaaaagaaatattcccagaatttccagtacaatctcaattttaaatattctatcttgtcaacacaataactgtgctttttcgatcatgagatcccattttttaatttcagacttattgaggtataactgacataccaaattataaaagatattttaagtatacatcatggtgatttgacatacattgcgaaaggatttccttccattgagttaattaacacattccttgctttatatatttatctctggtttgtttttgtttgtttgtttgttttttggtgagaacatttaacttacattctcttagtttttttctattatataatacaatgttaaatttcaattacagttaccatgttgtatgttagaggttcagatcttattcatcttatcactaaaagtttctacctttttaccaacctctttctatttcccccagcttccagctttggcaatcccttttctactctctgtttctatcagtttgaccttttctttctttaatattctgtatataaatgatatcatgcaatagttgtctttgtctggcttatttcacatagcagaatgccctctgttcagttcagtcactcagtcgtgtctgactctttgagaccccatggactgcagcacgccaggcctccctgtccatcaccaactcctggagtttactcaaattcatgtctatcgagtcagtaacgccatctaaccatctcattctctgtcatccccttctccttctgccttcgatctttcccagcatcaggatcttccaatggtgtcagttctttgcatcaggtggccaaagtattatagtttcagcttcagcatcagtccttccaatgaatactcaggggatgatttcctttagaattgacttggttgg

SEQ ID NO: 64867 - DNA, 1478 bp, Bovine  19866881422157
  misc_feature (1)..(1): n is a, c, g, or t
ngaagaaaagggctttcctgatggctcagtgataaagaatccacctgcaatgcaggagacaaaggagacaagggtttgctccctgggtcaggatgatcccctcgaggaggaaatggcaacccactccaatattcttgccaagaaaatcctgtcaacagagaagcctggcagggtacagactatagggtcacaaagagttgaccacgaatgagcaactgagcttgtcaaggaagaaaacctctttgattgcaactgcattattaaaaggcttttaaaccatacttttaccgtgccaagtcacttcagtcatgtctgactctttgcgaccctgtgcccaccaggcttctctgtccgtgggattctccaggcaagaatacttggagtgggttaccatgcccttctccaggggatcttcttgacccaggaatcgaatccacatctcttatgcatcctgcattcccagacaggttctttaccactagcgctgcctgggaagcccaaatcgtacttacctgttttcaactctgaatagaataacaagcctcatggctttttgtctagctagaagatgacttttgtcaaagagatgatctttctctgcctcttactctgctttctggaacacttttcctcgcgcctccaagatcagctaaatgtcactataggtaccattccattctcaccatcacattccaatgcagagaaccactaattcctccctggctatactgaccactattacactgactatgatagcatacatcccattgtaccttagttaatcccctgtgtccttgactattccctctgtataattcttaaatacacagactgtgttttgctcattatctttgtatacgtcataccttcaccttgtctgcttcatagtaaacattccaaaaaagcatactgagtaaatattcgttgtcaccgatcatttcacactatgaaaacaccagggtctttgtttcccttccaccccatctgtgaaccttcatcattgacatctacatctatacatctaatatgtatattagaaattcatggtcagaatgagaatgttaaagactggattgatcagtctttaaagaattttactctgattgcacttttctgattcatcaaatgtacaaaattgaaagttagcatttgttgtccaacagcgtttttaatttagaacccttagccccctgagataactatgagcatgatgtcctagggcatgacattcctggaaagtactattactcattctcgtcaccaatctgcatttaaaggtcaaaatctgaagctccttgttatatatgtgggcaatgaccttggaaaggattgacttttcactgctctcattcatcctcaaataattactttttcctaaataaacttatcaaagattagagctgaactctacattaaaagggttccctgatggctcatgctgtaaagaatcagcctgaaatgcaggagatctggattcg

SEQ ID NO: 64868 - DNA, 1037 bp, Bovine  19866881547007
  misc_feature (1)..(1): n is a, c, g, or t
naaattctctggaatcctggagtgggtagcctctctcttctccaggggatcttcctaacccaagtttcccacattgcaggcagattctttaccggttgagccatgagggaagcctgaatttaaacgctaaaatgcatctactttggatgtaatgtcactttgccctcatcagctattaatactattatgaatgcagatggagggaatagttttaatagagcagttgtgggagaaattagtgaggcactttttcttctgaaggagatgggaatttgacaggcatggctagaggcaaatttcacgtgcctcgtaattttgcttcagactgactctgtgttctgtatatttgctcacaagtgtagcacataaatattcaacaccccaaaataaaaggagaaaaaatttatgtggaagaaagtgactaagggccacaaacctttggaaaaatcagccaggcaagagagaactccattcacctgctcctattagccatttatatgaaatatagaggaagacaaggattccttccttactccagaatttcagcttttggtggaaaaatcagttactggtgataaaacagggtggagccttggattctagaggttggagcatcatcagggaagaaatgctgaagaggtgtgatgagtttcagattctagaaagatctattttgggggagagctagaagatggagaagtggccactagaattttctttttagctttccaaagaagacacacaaaaggagtctttatttgtctttgtttttattaagaagctaagaaaataggtaatgtggaggactatagagtaaggtgtcatgatgggaaaccagtccagagtggttcatgtactaccagaataattcaactgaattaaactgaatttattttatccttggtctttcattttctgagctccaaaatgtatttactcctactgggagatcctcttgggaaatattttgaattcaaataaaagagctaatgtgttaaatatgagattgtggaaataaattttgagtaattgcaatg

SEQ ID NO: 64869 - DNA, 1125 bp, Bovine  19866881747264
  misc_feature (1)..(1): n is a, c, g, or t
natgtcactttctctggtcctcagacttctcctctgtaaaataaagatggatctaaaaatgatctctgtcttttcttgcttaacatgcttgctttgataagattatccatctaaaagtcgttccacttcatcttggctactaagccacttttaggaagctgtcattaggctgctttctgcacccatgagtaatagaaaatttaggaagtttatatatatatatatatatatttatttaaatatatctatttatttggcagttctgggtcttactcgcagcaagtaggatctagttcccagaccagggatcaaacccagaccccttgcattaatggtatggagtcttagccactgggccaccagggaaatctcagaaggtttatatttttaatatattttaaatcaggagctggcaaactgtggcctgctgcctgtgtttgtaaatagttttattgaaatacaccttacacatgggcttatatacacatctttttattgaaaaagttttattgaaatacacctcacacacacacattttgcctatggtggctttagcgctacagggcaaaggtgagatagtcggaacagaggctgtaaagcctgcaagcctgaaatatttattatctgcttcttttcagaaaaatatcttcaaaaaaattttgaccaatgctttaaattaaatataactgtttaacaaagcaacaaagtattccatatcactattagtctatttctaaacctaatgtgaaataataaagccaacttcaaagtaatgccaactcagtacaattatacatcttactcataatttcttaataactatggagaacatttatttcattctttcctctgtattgctttaaagagaaaccttttaaggttttctttgggagtggggatcaaaagctcttggactcacataaatctcccctgctcttgaagttatactcattaccactgatctcatcctacttttactttgcaatttaattaaaccccagaaaattttgttctgcatttctctttcagatcatttctctttctattttcttgatggaaagacaatttctagactcccctttagttacacacattccatttttctaaaacaagcgttctctgtga

SEQ ID NO: 64870 - DNA, 1096 bp, Bovine  19866880573763
  misc_feature (1)..(1): n is a, c, g, or t
ntttgtgtcttgctttttctcccttaatgctttttttttttcatgaacatttatctattaattttaagttctgttaagttcagttttccatcctgtgggtgtaagtttcttttttttctcttatgttcagatacataattcaactgcttccattgctgatcactgactttgtttcagttctcatcattatgataaacatccatacacttaaatccttgccttctagaaagacttttcttctactctcagttaatgagagtgcctattaatatttatctttaccagcattgaatattttcattttcaaaagtattagtatggtatgtttattgaagtgccttatttaatgggctaggtaataaatctgaaagaaactgatagcacttggtagctctgaattcaacagagtcctaacagcataaaaagcaagacaaattagattacatatgctggaatgtgcttagtatataaaattttgttttaaactatagtgtagttagagggtataaggaaaagtcattggtgatagctacatgtctatggaagaatgtattttaaactgtgagatctatattttgatctagattgtaaactcataaaagacatgtttgagaaagaagcaactataaatttttgtttagaatgccatgtcttatgtatagactgtacactctttaagcctcgtaactttctcagtgactaataatgccagaatagccaagtaagtcttttcttgactaagccagtcttttattgaataagcatttatcaagcacccattataaatacagcattattttacacaacggacacacgtgctgatgtcctaacccagtgttatagaactaatacctggagttgtctctttgtttctcagtataattcttatttttccacagtctaattttcttgtgtttctagtatttcgtatttcctgtatttctagattttagactcatggtcctataataattgtatttgctcaggtcagtccttttctgaacagattgaaaaaaaaaaatgaatgtgtgtctgtatataaaacaagcattcacataggtttaaaaataaaaaacctttaaaagtcaaaaagcat

SEQ ID NO: 64871 - DNA, 2209 bp, Bovine  19866880848440
  misc_feature (1)..(1): n is a, c, g, or t
nctttttttgagacccttttattttctagatagtgcaacgttcttatgagtgatggggactcatcctatgctgaatgaaaatttctcttgtcatagttgaggaatgtcatgatgctgaaccatcagggccttgaataacagtgttgcaacacctggggatttcttcatcgttattagttcccccaaaacatcttccataaaagaatggcctgcacttagttgaggatacatatgtattagttcatgatgctaatgttgggtttactctgatgaaagcctataacaccagcattattttgagataaatttatttagaacaatgtttctgcaactgtaacgtacatgcaagtcacctggagtcctgttgaagtgcagtctctgactcaggagtctgctgtgggcctgagaatcttagttgccactagattcctaatgacactgaagctcctggtgcacggaccatacctttagtgagacttgagaagagtgtcttgtcttgacttcagtgtagtttgatatacagatttcaaatacaaagggttttatttgtttacttctacttttatgagcgtgaatgaaccaaaaaccatgtgatttattttcttccgcacacagtatagcaccttttgggctctaatgcttggttgttggtttgcttcagtttatattctggggcaactgatggaagaactgaagagactgtggtatgaaggcagaatatgtgtattaggtaggtaaagatttgaaaaatacagtctgttattggtaaagctgaaaagtacagccaggggccctttcttgacatacgctccagcattcagattttcattttgaactaaggagaagaactgttaaaaataatattttattcccacagttggtggtttcagttcattagatatcattttagactatttctctttgacattcttcttagttttctactctgatgatcaaaagagcagaacagcacttgccctttttgactgcacatgcttttaaattgcagttaataaccacctctgaattgtaatgaaaaaattgctctaaaatgcaactctttatttctttttcttaatgtatttgttacaaaaggtaagaaattgtaaatgaccaatgaaaacttgacttttagagacagacttgttattgtcatttaaaagaacaaaaatatcaactttttagagtgttttaattgggaaataacagagaatgggagaatccattttctcctaacctcttagtcctgaatttctcatataagtactcccacccaaagcaaaagcaatcgatttttgtttcccttgaagcttttatgtttttagtccatttttctttttatagtaatgcattttcaaagtaaattactgctgctatggtgtgtttctttaaatacttgacttaatacttctataaggcaagaacattttcctctatagttcaataactaaatctttaaaaattaatagttacctaagattatctgttacctaggccatgttcagctttcctaaacatccttgatatttggttttataaggtaggatatagtccagaatcacattttgcatatattgtgtcccttaagtctcgtttaatccataacagctttctggtttgggctttttcccccccatctcagtgatatgctaaagagaccaagttagttgccttacagcatgttccactttctgggtttctctgattattcctttgtggtttaatttaacttgtttctctcctgtatcttatataagctggaaattgggtcttgagacttgcttagatacaaatgaaatgctcactgaatacctgagaggtgatgtgctctcgacattggatcgccacttgtccctctgttcatagcacagaagctgagcaccagaatgcaagggtgatagctgatcccgtcactgtaaaatcactttgatttagtgattagaaaattaaaaatgggttttgtggcagactatgatgtacactaaggcttattcctgaccaaagcagctgtgataacatctgtcctctatgactctgggccagaaaaaaggtacaccttatgtagtagtattatacatccttcggagaaggcaatggcaccccactccagtactcttgcctggaaaatcccgtggacggaggagcctggtaggctgcagtccatggggtcgctaagagtaggacacgactgagcgacttcactttcact

SEQ ID NO: 64872 - DNA, 2141 bp, Bovine  19866881141694
  misc_feature (1)..(1): n is a, c, g, or t
nctctgaatatattaagaatcatgaactgtacactctaaatagatgtgtatataaattatatctcaataagttatttaaaatatttttaatatttaatattacatattaaaaatatgtaaaagaggaaataaaaaaaatacagaaagcatctggctcttagggtcagctaaaaatacctgtcttactgcaggagtcttcaaaattctacatccattatgttatttttgcacaggatccttctttcagttggaccaaaaaaaaagtgatttaaacattgtacttctctaaactctggagtaataatcacatacaaaaaaatataagatcctttgtcttttcttgatgccattctgggggtcttaactctttcacatgtttagatatcaactattccaaacctcttaaaatctagaatttcttaaatttcttgattaaaaaaaaaaaagtcatgaattcaaatactgtcctaaatgtcagatggacactctcttgtaattcagccctaagtattacaggcaaactaaacaactagttcacaaagcaatttttgtgatatatgttgtaaaacctttaaagaataatatagaatgatacgattatttaaacatggccacctacactacctctcacccacatatgctggtgtccaacagtccaatttgctagcaacggtgagcttttacgaggcagcctgtggaagcaggaacacaacgaaggttcccttgtgctccccagctacacgcccacggtggcatgaggcacagagcccgtgccaaccacctgaggagggcagaacccctttactcaatgcagacgagagacgggagatgtcttgtcctttatgctgctactcaaggcccccccccatagcagaagagtccatgtttgattcttaaaaagaatcaattcaacaacatcttaacccctgggttgctgtgccacattcagatctttcctcacacctaggttttggcctcttttcctcagggtcaaagctcaccatcagtctctcacttcattccagaattaacatcatggatcaagaaaaagaaagatctgttctctataaggaagaacacaaatctgttttgtaggaaattgttatatataattacgcaattttaaaaaacaggccagtaaacttgaggttaaatttcaacatacaaagaaatacaaaaagtagttcaacaatttcaacgcacacacaaagatctagaaaagtaattctaacttctaatcttaaatatatgtctataaaagtcttgtcaaaactttaaaatataaccttaggaaatgtttctctttactgaaggtatcagttacttgggtattattaaaaagtaaaaaaatacgtcaccaatactgtaagacccaaggctgtggagagatggcccctcagcttgcttctaaaagtctcttctacctgaatcataggaagcagtagggctggagttctagtcccagggctgcctctaaaaatctctgtggtcttggataagttatttaacttttccaagtctccattccttcaccatcagcattttctaaacattctgtccaaggaatattaatctcataaagaagtgttctgttttcaaattaagtcagagactgctacacaccatttcccctcttcaggaggttcacgcaacacgcattagcattactgaaggctccgagaagtcctgcagcatccatcctggttgacctcaggatcgcttacctgctaacactgcagcatcctgtggactacactttggaaaacactggtccagcatatcccaggtctcttccagccctgacactgataacaggcaggaagagcagtgcactactttgttgcagcttctgaggtttaagagaggctttaatgacctggagttgacaaggaacttattcacattaactagacctttgaagatcaacacgattcccttgttcctaacgagagtcttcattcaaggaatcgtcacacaatctcagtggccgcctacaggacaacacacagaactgaccaagaaggatcagttatcttcaatgaagtttagctttcctttccggtatggtttgatgtttctctgtggcgagcgctttggccactgttccttggacagttctgcccgcccgcccatgcccactt

SEQ ID NO: 64873 - DNA, 1595 bp, Bovine  19866881223836
  misc_feature (1)..(1): n is a, c, g, or t
ncctacctgtgccctgatgtcccactcctcctccagagctcactcagctccttacatgtgatcacagtatcatgtgcttctcctcataacccttttctgagttgtaactgtacactgacaacttgactgtatgctccatgcagggtgatgtctatttaatattatgttgatgtagatttatccactctgcttgacacatagtacacactcaacaaatactcatggactagtgggaaaatatcaatactttaaatagaacattacacaacaaatatttattgaacataatctgtgctaagtgccaggtgtagggcagtgaacaaggtataaatgtaaactctgcacaaactatccttctaattgtatgtatatgtaggcacctgctgggcttctctgctgggctcagctggtaaagaatccacctgcaatgcaggagacctgggttcgatccctggtttgggaagataccctgcagaagggaatggctatccactccagtattcttgtctgtagaattccaaggacagaggagcctggcaggccacagtctttagggctgcaaaagagtatgtctgactcttttgcaacacacaggcacccattatattggtaattatacatgcatacttgtaattatatacatatgtatattataataagatacttgatcatggtataggaataagtgatgggtatgtgggttttccaagtggcaccagtggtagagaatctgcctaccaattcaggagatccaagagacatgggttctatccctgggtctggaagatctcctggaaaaggaaggcaacctactccagtattcttgcctgcaaaatcccatgggcagaggagcctggtgggctacagtctatggggtcgcaaagactcggacatgattgaatgactgaaaatatgtgtacttagtcaaaggctgaaggtctttctttttcttttcatgtgaaagaataaactgtcttataaaagaggcctacaactaggctgattaaaacagtggatgtccacatttggcagtattgattaatgttaacaggctacacttgaagataaatatccagtcatttatgaacaaacaatagttcaatgaatagttgactgcagtttgtattttgggggggcatcctgaagtactattcaatggatccccagcacatgtgcacaagcagataacaaggctcttgggtacccacaggcctatctcaccagggtgagaattagcatataagccacaaagctcaaagagtcagtcagtggtgctgccatgccaaccacagcacagccaaagggatcaccaacagggactctggaagacatcaagcttctatcgccaaatacagctggccactagcccatctttgtagaacacagcataagactcataccatatgtcagaagagtaaattggggaggggggaagaatatccatttagctgtgtatgttttctacagctactaatatttccttctattttttctgctagaaaaagaaaaggtaaaagtgaagtcttagtctctgctggtcttaagtcattctttatttgctgccttcaaatctttcttctccaaagaccaacaag

SEQ ID NO: 64874 - DNA, 3144 bp, Bovine  19866880733523
  misc_feature (1)..(1): n is a, c, g, or t
nctaaaatatctttctacaaataataaagatcaaaatcaatacaaaccatttggctgctcatataagtcatccttgggctgaattaaacattactcaaagcaaacagttatcatttatccagagacgaggaattaagtaaacttagtacacaaaaaagaacaaactgcttttaccctttccaaattacaggtgtgatacactggtacctaattatcattttataatatgcagtatcttatatacagtacaatgcattgtttcacaattgtaagctgctttgttttgttggagggatagaggtgcttttgttttgaatatgaaatattataacctaaagactattctaggaaagactttttcatatgatatgtgccatcatttgtcttaaatcatgaaggagatacactgtatttaatgtgacaaatgttaatgaaaattcttagcactttgcatctggcctctagcaaatccagtttaaagcaacagggtttacatctgtggagatgaggatgctgaaaggtatcacattatatgaatgtcttttgtacgcctgctagcaacctaagagcacagtaacagtcaactaaatttttatggttctaaaaaaaagtaccaatattaattatctcttattttatttcaaagttatggtcaaaatgttcaacagaactgatgttattaatgtaaaattaatctgctaaaataagttttaaattagagatcttagttaacactggaaaattcaaaatcacattctctttcttttcagtgtgttattgctgaaccattccatatattgctttgacaatattccatgcatctaaaatacataaatcaaatgagatttcagttagaaaatgtgtgtaaaggaaaaaaaatgcagcttttattattaatatgtattttcacaaactgtgttgtggtttaaaatgtaaaaatatacacatgcaaacacacacacacacagtctctacctaatttgttgagttaatgttccttctcaaaaaatatatactttgaataagatgaattaaatatggttgtttggattttagaatgcaataaaatgattacattaaaaatgaccatatttaaggggaaaatagctaagttgggctaatttattattactactcattgcatttaaagaaacttggaccagagatcaaagtgcattttgatttgtttgaaaattgtaaatgacccagtcccagatttccaaccccataaagttagaaagcagtctgtgagtactctctgctctaatcaagaaggaaggggcttcagcttcaaatgtcaatgctgtaaacatgttaaatctggaaaatattttctaagcaagcaaccatgtgtaaaatttactgaacttgtcatgaaagggctgcagctgcaaacctacaaacttctcacttccatgaagactccagatgccgggacagggaagcaagattttcatcgtgggtccccagctgttgtaccttagagcattgcctgccgccatcttttaaacaattttttaccaggtaaagaagctgtgatcatttaataccaggaaagaaaatcctggcttccttcagaaggtgctccatataatttactacagcattgccaacccaaacattcaaccatagattgagatttgcaatccttccagctgcccagctaaaccaagttagtttagcaaaagctttcaaaatgcagaaggaaaataaccagctaattatagaattaagcaattgtcatgtgctgttgccaaaaaagattcccattaaattatacttatgcattattttatgaaactttccgaaaaatatgtttgctgcttataactaaaaacatcttgggataaatttaaaactttgctttactacagaaacataaaatctgccagatatcatcataaacaaagacaatttgacgaattttaaaaaattactaacactccttttaacactactagcattatatgtgatatttacaatatgcaatcttcttttataatggaaaaggggtttttaaaatgaaatctgcacttaaatgccaatatcctctccttctggcttctcactttatgacactaacataggatctcattcaccaagccaattggaaattttaataaaagaaagcaggagtttctaataaactcctgcagtgagctgataatactaaacatctttagcagcatggtgttttttattattattttagctgtatattaatatgctagtatttgtaaactccccagtgccactagatttatttcagaaaccttcactacattcctccattgtgaaaagtttatctgacaaagaaaaattctttttcgatgattttccacccaatgactactcaacaggaaaagatatggctgacaaatgtgttgcatctatgcgttcagtcctggaagaaagagtaactgattttacttattctggtgccagttctgggctaaccaagaaagctggtataatccataactgctagagaggcattatttgggcttttgttagaaatgtagcaagatatactgagctacatctttcaccaccatgtctccttgctaggtttatcttctagtccatccctctataccttcagccccaaatccccaccacacctcccaactagactgccattactcttctattggagcaataggggctgtggctgcatagcttccacttaaaacatagtatataaggatccatgtttacaatgtagtttggatatggagttcaaataaaaccatggggcacagtttttataacactggatacgatgcagaactgtcaccatcaatagcagtgaactgttacatatacttcatgtaatgagtcaacagttagatagcatttactgcatgtcaggtactgttctagccacttgacatgtatgaacctattcaatcctttccacagctctgtgtggcagatattattactgccctcacttcatagaaaataaaaccaagaaaggaacttgccaatgtcatgcagcttgagaatctgctcaagattcaagcaagaagtctacagagtccaactcttcatccctctgcctctgtaaacaatgctgtatgacaactgaaacttttcactggtaccacttctctgaataacacctattccattacttctttg

SEQ ID NO: 64875 - DNA, 1596 bp, Bovine  19866880839717
  misc_feature (1)..(1): n is a, c, g, or t
ngtgaggaaaatgaggcacagaagtgttaatcaccttactcaagaacatgcaataaatcatgggcagagctggaatgcaaacccgtataacactgaaagcacacttacccagctggctctatcacttaatgctactgccaacaatatgtaaaactactcctatttgtatttttactattctagacatgtcacccattaacttactttatcttcattacaaccctatgtagtaggtactatcatcattacctgtaatcttatagatatgaaaactaaagaacagaagacgaactctagagtttgtcctcttagctattgtactattccaacaatgtttttaaaagcagtaatggaaaacttaaaaataatagatacaagtacttgagagatttttacaagctagctacaaaatactttttgcacattgcctttattataatcatagtaggtgtgaatagtttttaatcacattttataaaggataaaattgagacttagaaaaattaagaaattttcctattatctcattaatctatactgttggaacccaggattcaagactttagggactagccccaaagccaaactacaacactgaattcgtgtctatgaccataacacttcttcactctttcattcaacaaatatttattaagcacctatgtattgtgtggagtttcccaggtggctcagtagtaaagaatctgtctggcaatgcaggagatgcaggaggcatgcaggagacattcaggagacatgggtactatccctgggttgggaagatcccctaaagtaggaaatggcaacccatttcagtattcttgcctggaaaattccctggagagaggagccccagtccatgaggtcaaaaagagtcggacacaattgagcacactgagcttgcacctacacgtgtattctgtaccaagagatacctttctatgttttcccaggtggattgtaaaatagaacataagattttctcaaccacagaaagcctctggaagaatggataaatggtggcaaagatgttcaaacaaaatgcagtggtagtttgacaatgatcattctaggcttgatctcagaaaatatttaaattaactatttccattttaaaataaaatatttaagttcacaagtagcagcaaaaaaaaaaaaaaaaatcccagaaatgcatataaaaactgaacaggatgttttaatcactaatcttcccacaaagagacctctccccatttcaataactaagtctgtgaaaataaaatgagactacctactgcagtgttttgaaagtatgttgaatagcttctcccactatttcacttgcaaagtgaatgctaattggataaagccaaggtctttgggatggggaatcttgctgggagtaaggagtaacaacaattataaagccagttactttaaggatagcagatgtcacaggctgtcctaactgacgagcctttgtgtgatcaactgtatcctttctcttcttttgacctttaatttacttctgatattttctacctgcttgaatgcactggacttttcatttcaaggaaactagtatcatggcaaatatttacatttattttgtag

SEQ ID NO: 64876 - DNA, 3057 bp, Bovine  19866880925452
  misc_feature (1)..(1): n is a, c, g, or t
ntaagtgaagggctcttcagtcctggggaagattcattatcagtacttttctaggctgtgtgacatgggagatttggtgttgattagcagttgatgtggtgaggagaaagcagaatgacaataaggaaacctcttaggatatgcaaaaaagtgcaacccacacaagactgccattcattagataaatgtgatgccagattttgccaaacagtaatatagagaataaatactcaagacatagaccaaagtccaaggagaggcattgagtcctgttcatggctttcaccacctcctagggacaccatttctctagatgaaatttagcttttagcagctacgttatgaggcagggttactaatatgactcctttgaatatgaaaaatagaaagaaacccctttttaatctttgtttttatggctgcaaacatgattacatagaggaaaatcaatcccaatggagcacaatggataatacaaagtaattgattggcctttatcattttctattacggtattaaaataacaccataacatcaagcagcagccactgatacataaaggaaaacaggagttgattatgtctaagggtaatcaggtcagggaagtgtgaaggtaagataaataaggtaaatacaaaaacagaaaaagtcttcaaagaagcaaaagggagttggtggcagagagtcggcacaatagaagggaggtctgcagttggcaacatcattaagcagtaagccacgagagaccgtctactgcagctgtgtgattgcagtatgtctcggttggtgtcccaagccatgggggcaaaagctgagcgacttcaacttcacagaaagtgcaataatcctttcagaatacaatgcctgcagcctgactgccatcaggctatgaaattcagaaaatgaaggagacgaagcatttagctcttggtatttcccaggcactaaggccaccagcatggttttgtgagcagccacttagaaaaccttcatttgcagccaactttgcaaactgcccgagacaagcgaggctttgtcagctccccaaatgccatggtctgtgtcctagtggcaagtagctgaagcagagccctggagaaaaattccatcagtagaatgcctaggtgtgttatgctgcattcttgcctgttttatctctccatatatattcattctctcaacaaatatcccaagaatactggagtaggtagccattcccttccccaatatatttattctctcaacaaatatccacacttactaatgcttgcataaatgttactaattacattgtttgatattaaaatatgaccaaattttaattcttaccaacatttttattctttgaaaatactttttgggtcaaaatacatatatgcacattgtgtctgatcaataaacaaatacactcagggactagtttattcaaatatacaagatattagttctgatctctttgtcactacctaacactcttctaatttaaagttaacataatgaaatttatgttaaccatccagaaaagccttgttgttgctggaagtcagtttttcacattcacacttaaaatacagtataaaaatgtcatgtccgccagagtgacccagtcttaaggataagcagtaatgagaaatatagcttaaggtgatagaataagtcatcatgtggggtgggagcataagagagctggttagctgtgacaccctcaagagatgtgagaagtagtttcttactcagaaggactcttgataatattggatttgtttctaacttttctaaatcctggggggttgaactcctttgttcattcattcacttatttattccagtaattgaatgcctattatgggtctagaacgtaacttggtgctgtggttacggagatggcctcaaggagcccatgggcttttagagaacattgacatatatggacagatatacgaaaatgtcctggttgacgtgactcaggtgctatgaaatatggagcaaatgagagtgagaaaaaggcttcacagaggtgagcatggatggaaaagtagatttccagacagaaaagaaggatatgggcattttaggctgcagactttcatatgaatggctcaaaagacagaaagagaggtgctgtggaacagagggaagagcagaatagtgcacctgtgcatggaatgaatggtgggagttggacaggatggcaagtgaagcccagattcccaaggaccttgtctgccatgctagagagttgtccctatacgaaatataaagcctgtaggggtgtttaagcagaggcacagtctgatatgatcttggggtggtggcatttgggtatagggtagagcataggtaggagtggggacgagagaggccattgcaccgtatagtaatctgtggtcctggttgaagcataataaaccacctatgctccatgcagaggggattgcatcagaattatcatgccttgtctgtcaaatgctcccggtagcaagtgacagaaaactgaaaggtatcatctcatctaacaagaagttcataaagccatggctctgtgtgtggtctgtcagggtcaagctccatttctcagctgttctcttagtgatgcttctcccatgtgttgtctttgttcttgagctggaggcagcatgactgcaatgacccagatggcaaaaaatctacctgcaatgcaagagacctgagttcaacccctggcatgggaagatcccctggacaagggaatggctacccactccagtattcttgcctggagaattccacggacagaggagcctgatgggctacaggctatgggatcacaaagagtcagacaggactgagtgactaacactttcactttcttttcatctagacacactgtgtccagaggaagaaggaccatctttttttcctaatgtctcttccttaggaatgaggacacctttcccagaaattccgagcaggtatccctcatgttttattgtctttgttaggtcaaattcccattcctgaaccacttactgataaaaactcacaatggacttggaaagtcaactattgtgcctgtcc

SEQ ID NO: 64877 - DNA, 1153 bp, Bovine  19866880951960
  misc_feature (1)..(1): n is a, c, g, or t
nagctagcatttgttgagtatctactacaggccagactgcacactgctcgcttttgcacaaatcatctcaatttgtaaaatgtgatagcaatgccacctagcagggctgctgtgatgatcaagggggatgctacacaggcaaggggtccgtgtttgtacaaacagcacaggcttgtacaaatattaggggtgtgtcattttctgttttctacatcagtgcttccaaatgatcaaactgtaattttgaccttagaaacagccactcatctagttttattctctagctaaatgatccagaggtaatctaagagttatattaatcttccccgagctcagctttaaacctagcactctcctgctgaataaacaaataaacgtgaaacacctggaaaatatccaaaacatttgcatgatgcatgaatttaagggtttccacaatccagcctcaaataaccttaccagcttctcccaaagtgacttagcatgcacccacatacgtattctgcatcaggttttcaacaaagcgaaataactagtcagcctcctttccaaactctggacttcacttccttatgtcctatactgggaactcccttctttggtctttgtaattgatgatacatgtaaagaatttagcccacagcctggaatgtggtatgttctcaataaatggtagcggctattatttttaactcctactcttaccatgaccatgagacctcgggtagtcttatggaaatgttccctcctctaaaagccttatgagttacgatttcaccctcctctacatgtctgtagcttaatatcctaaactctgggggtatattttagtgattttctatgatatactgaaattatatacacttatttattcaaaagacacctaagcatctacttggtagcaaagtttgtgttggaagggatacttggacaagatgtgttttccctaagggagctagcagtctaatgggtagccagacaactaatcaggtgttagttgtcacacctacattgtaaagaagcctttccctgcttttagtagcagcagcagcagcagcagcagtacctctagggtctttcctccattcagcaggtaaagtgcacactctaaaaggtccatcagatcacatcacttcactactaaaaagcgtgc

SEQ ID NO: 64878 - DNA, 3117 bp, Bovine  19866880955217
  misc_feature (1)..(1): n is a, c, g, or t
ntggatcctgaggcactgaaacgatacataatgacaggacttttcagctagtcttaataaaggagattaaagcaacgtgtaacataagatgtgtgttaataaaacaagtggtgaaaaataaccaattgaagaacctaataataaacgcatatctttacatttcaattagctttttgctgatgctgtcttttttttcaacacttacaaatatgtcacaaccatagaaaaatggttattaagccagagtgttcttgaaaatatgactatttcagttgccattttaaaataaataatctttctcatacggtaacttctcattcaaagctattgcaattagagcaagaatcaatcactgtgtgttcagacaccgctcaattttctagagctattagcgcccacagtctgcctcagagggttggaattctgagcagaaatcagaaaggtaaaggctggagatgcaaactggtgtatatagggtggctaaacagtaaggttctactgtataatgctgggaattatattcaatatcctgtgataaaccataatggaaaagaatatgaaaaggaaggtatgtgtgtgtatatatatatgtgtgtgttagtgtgtgtgcgtgtgtatgtataactgagtcaccttgctgaacagaaaatgttaattcaactatacttcaataaaaaaaataaaataaagaaatgtaaaagctgggatgagacatcttggggggggtggcaatagtagttagaataccctttattggtccacagacacgtgtttatcatcagcaagaattcagcttcctattaataatatcccttgaactttgttgctaaaatatttcttccaagtgtgagtcagattcttggtttgagtcttttgttctaccaatagttattttcacactaagatgccgaacatttagctgtttccctgcagaagaaacgctgagctcacagaataggactttgttcccgcttctttacccagttgaacaatagcaacgtgaaaagaaacagtagaagtcagaaagcagaatgatggcatcctttggctattactctatattctcctcatcatacaaagtgtacatctggtttaggtcttgggtccttgtttctgttgcaatatcagaatgttaggaagtagtttttacttataaaaagagtacaacagaaagccatgaaagctgtatcagtataaatatatctaaaaaggattatactaagttataatacttaggcatcattcagcgctttagataggatcagaaaatcaaatttgggacagtgcattgatctgatgaaagaacaaaaaccctaaaatatctcaaaatttaaaatcagaacattgccagaagtatgctggctttttttttttaatgttataagcccatgattagaaaacagataatttaaggattcatagtttatttcactgagagaagaaaaagagcatgagagcaagatcacttcagagtgaggcggccaaatctttccaaactgattttattatttaacctctgtggatttttttcttctatagtctagatgatcagcttgatttagacatatcttttttatcttggtaaattaaataaggcttgagcaatacaaaaatttaaataatgtttttattctttaaaaaaggttatctcaggagtttctttacaagtttatgtctgaatatttcaaccttgattttggactattatgaaacagatgcttttgttactgttaaaacaataatccaaaatatttccacgtgtcacatacaataattttttaaattatatacaattcaggtaaaattggtatagaaactaaaatgaagagaagagttaagcaattatctccatgggtttaattccatgagccttccaaggctgaaagcagagtctcacacactattttctccttaacaggataatggctattaacgactcagggagagtagctaagaagggtgttttgaacagactgagatcagctaaagtcctcacaaagtgaatgacacagacattgatcaattccctaccagctattcccacatattcacccccattatgattagaaaatataagatataattacaatgttggccaagtgaagctgaacctattttatcctgttaccaacaacttccattccttgccgtacaacccccaacacacccaaagaaggtatattttcctagctctaattttaacttgaaaaatcacacctcaagaaactcaatatcctttttaaagagtaagaacaatcaaaaagatgcataatatattcagttcatagcagagtgaatcattgaggtaacttccaagatatgaaaatgtatctgttaaagctcagatttggttttgtcagaagtacagtattaaaaatagaaagttgattatataactttgggaggagaaagtaaggcattagcaaacaatgaaagaaggaagaaaataaatccaaatgtcatctttatgaaagtataaagaaaggaggtacaccagaacgagagtgtaagtttccaatcaataactaatccacaaaagtgatagatgcattttctttggaattaatgaagtacaagttactgataaacaccctggaattacctagcaccttctcacaaagcatcaccctaggcaactttatttcttatcatgactgtggatttagaagagcagatatccttagcaccattttgcagaatgacaaagctgaggcctatatttaatttcctaatgttaacatcaaattagccctcttttttcttttttttttaatacccaaaactctcacttaaaatataatacacagtatatgtttcttaagtcgtttcgaaagttgaaacaatttaacaactaactatggaggtaagtacatgttttaaaaaataattctccaagtccattccaaacttctttgtcaattattttaattatggatactactaacaatcaaaagactatctcagattggtcaaggtattcattcaacaaataatagttgacctccattgcgtaacaggcatgcagatataaagatgaatataacacagtttctgccctccagaaaatcacagaccagtgatgaaagacaatgtccctataattataaaattccagca

SEQ ID NO: 64879 - DNA, 1076 bp, Bovine  19866881039352
  misc_feature (1)..(1): n is a, c, g, or t
ncttagtaagattctcgctataattaaacaatgcagagatgaacatgaaaggccgaaagtcagggcttgttgaaaagagagtttagagaagcctgactagagtttgggaaaggacagacgctttgtcaagtaaactagaatagtgaggtctacttgccattccactgatgctaggtttgtttatgacttgctttaagccacagacgtattaggggatgtgagactggcaaagtctttaaatatgcttgtgagtttgcttgtgtccacttgggctccttcacttgtcattagaagagcaagttctaagtagccattggctctttgcccagagtcccagaatgaggaacacagaacagatacgtctctaactggaagcttgtagccgacccgagtcaaaacagagtctgaagcagaagtgtcccagacaacctgcagacctgtgagtgagaataagtccttattgttgaatgcactaaatcttagggtagtttactgaccagcattaattgcagccacagctgcctaatacaaaatgctctaattaacacttccagtggcctcaagactttgatttgctgctagcatttatcacaactgtaatccatctatgttttgttaaccattataatttagcacagggcatgtagtaagttcttaataaatgtgtgttgaagaataagtttctctatatttcatatcatgcccaactgccttgcttcatgtataatgttcttagtaagtcatcttgaaaatatgtgactttgtttccagctgtgtctatcctcaagcatttatgatcctcagcagttgataacacagattaatacatgtggtgaaaaagaagtgtttaatgagtgcaaagtttgggaactgaacccaaactgacagtgatgtcattaggggatgaggagggtagatgtcccagtgaacttcctggggaagaaatgcttgagccactttagagatgtccaggccaaattctgaagctaacagtagttgttaagcatttgcagtaactgttttacatatgctgtctcacttgagatagatatcctgattatacctattttacaagt

SEQ ID NO: 64880 - DNA, 692 bp, Bovine  19866881409947
  misc_feature (1)..(1): n is a, c, g, or t
nttcccctattcacgctgaattgtctgattccaatttaaattgctagtcagaatttcacagctttgcacaacactttctaaccttttcctcttgggcatctctatttgaaatgaagctttactgtctctcatatatctgaaacaaacaagtgtacctacttgatggtttaatcgtaactggctaagctcaaaaaaatgagcagcaagttcaggaaaaatgcatgggacacaaccagtcgacagaaccaaaaccctcagcagagatgcaaatgatattttattatttgaaacagctgccttgcagtctcagacacttattttttctttacagatttttcctgaataactttgtgctggtgtggtatattctttcatgctttccctggtgaccacagctctcatgccatttaccttgctccaggtaatttggagaaataccacagacacatatcattacagggtctgtatagttgtttagctgctaactgattctcaaaggaagccgacagatactgtcactattatgtcatatttaaaattcttcgagataagcgtgcttattttagtgaaattaaaactgctggattttctggatattcaactataaaaaggtttacagaagaggttataatcaatattgcctttactagcaaaagaaaagaaaaaggaaatctatgcacatttttaagatt

SEQ ID NO: 64881 - DNA, 896 bp, Bovine  19866881503261
  misc_feature (1)..(1): n is a, c, g, or t
ntgatctgccgagggcatggatggaatctgatatgaaggcagcctattgattctttagattacctccttgggaaactaattattgtttaatctttatatgggtggatttttgtatttgaaaatctactcttttttgtcaacaagagaaatattagttttgatcctcaaagttcttgcctctgattttaaagggatatcactttagtgctccatcctttatggtatcaataagctactggaaaaagtggcaaataaatcccatagaaagtagttaaagaagatcaaacataaccttcactgcagaagtagaggtgtctattcttctttacttgaaaaaaagatcctgacttggagatgccctcttcttttagagagtctgacatgttcttttattcttccactaatatttacatgaaaatcaacttttattgtttgctgcaattgattgtgagctttgatatatagggggcagatttcaattacaaatcaaatgcttgcttagtagattgttaaccagtaatcactttaaaagcacaaataatacaatatacttggtcactggagaaggaatattaatgaattatgaacttttaaggaacaaggttgctaagaattttaagataatttaatcttgctacagtgcattcagttgaaatatgctttaaaattactatccatctttgctatttgggggttatttcatttttcagtaacgtgggcagagatttaaagatacttaagaaagattatcctttgaagtatatttcatttatctttcttttaaacatacgaaaaataaaatttaaatttaacttgtctgggtctttgaaatttctgaatgcttatcttttatgtgcaatatcatattttcagttagagttttcacaacagaaata

SEQ ID NO: 64882 - DNA, 1042 bp, Bovine  19866882222289
  misc_feature (1)..(1): n is a, c, g, or t
nctggatgactaggggaatcaaatgatatgtggatgtgaaagtttataatacttcccatttatataacctcatttatttgaataactcaatgacctttccatcaattattgaattaaaccttttaatattcctctgcaaaatgggaagtgtgcatttactctttattttatggttggatgatggggtcatgatgatttgaactgcttttctggggtgaaccagaccttacattcatgctttggatacatagttaaaggctgcttcctaaatgggacacctataaataaaatgtccttttttgtgactctgatgggattagggcagactgcctccaaatatgccactttggcatattgattatttagaattaaagttacttaagacatagcaggtgccagaaggactcagtgcctcctttgtccgtctgaaggcaggaaataaagtcccgaggtgaaggcagtcagtctccttgcacctggagggtggacggcatccttaatgccagagatagggaattcaggactgagaaagctgtattaacaaactttgttacttctgaattatgactccaagtctagaaaccctttttcatttcttcacaaataatttttgtctgtttaaaaatataaagtttcctgctttggtcacttctttgagtctcatattcttatgagctcctgtgcatatgaaattaaatttgttcttctcctgttcttctatcttatgccaattgaattactaggccagtcaaagaacctagaagtgaagaagggaatcatcttccattgtataccgctgtacattctcatgaacaattcatgattcctgtgcgtggttcctatgcactttctttgtataaaggctaaacaaacgtagtttgtgtctgtgtgtgtgtctgtgtgtttgaggtctgattgtaaaactagagattttccagggtgaatgaattcctagtaattttatagcatgaaatctaatggctttcattttcagtgctgatcaagtcttattttctagtgaggaaattgggaaaggccgctt

SEQ ID NO: 64883 - DNA, 1258 bp, Bovine  19866880773141
  misc_feature (1)..(1): n is a, c, g, or t
ncttggcaggaaaaacttgttgaaatcaatgaggataatctgaaaggggcccaggcctggattagagacattaaggtaagaaagaggctgggtctgggagaagaacagagatcaggatagaaatgcttaagaaactgctttgaactccaaggatggccatggtttcacatagacatttgttttacttacaaaggtcatgttaatccaatctttttagttgatatctaacatttagataggcttctactgacaacactgccctcagttcaagtctcagtctgtttatgaaaacaaatttcaaaatatagtttttttacttaaacattcatatttgtttcttctgagacttcatccttgtttcaaatgatatattacagctattttaaacagtggattttgttcaaaagtaatgaacttgtggaaatacacagtataatgtgagtggttagggctgaaagccaggacagagatagggcagcagggtgtgatgaaaaggtaaaatcacttcttcaggggtctattttacttggagaactttatatctacacagactactgggaagaatttcccttttctcaagttttctgttgtcttgaacttaccttcattttaaaagttctttttttagaatcacatagcattccacatatttaagatatactaaaattgagaccaaggactattcttaaaaagtcaaatatggatcatgctgctgctgctgctaagttgcctcagtcacgtccgactctgtgcgaccccatagagtgcagcccactaggctcctctgtccctgggattctccaggcaagaatactggagtgggttgccatttctttctccaatgcatgaaagtgaaaagtgacagtgaagtcgctcagtcttgcccaagtcttagcgaccccatggactggagcctaccaggctcctccatccatgggattctccaggcaagaggtacggagtggggcgttctctaggagctgcaattcctttgttctttccttttttcctttactctggaaattcctaacttggatttggagcctaccacatgtgctttgtactgttgtatccgttttctacctgtactgaagctcactttgaaatagctccgtgtcctattttatcttattctgtgttcttcatttatccaataatgcactcagttatcatcaggacctctgtgggtcaggcattgagctagtgctgggggtggaaacacaattgcctttcaggaagtttgcagtgagccagaggg

SEQ ID NO: 64884 - DNA, 2867 bp, Bovine  19866880899380
  misc_feature (1)..(1): n is a, c, g, or t
nttgtgactgctaatttaaagtctttatctgattattccaatgcctgagtcatctcaattctgtggtctgtcgattgccttttaccttgagaattgatcatgtttgtgtgctcttttgtatgttgcattttggcttgtataatattatacaatattaatattatataatactccacaatattatacaatattaatattatataatactatacaatattatacaatgttacaattatattaaattatattaaatattgtgttttagtttaatatattaattatattaaatattgtgttttaagactctaggtcctgtttaaatgctctggaaaggttgccttttttggtttcattttaacttgattagattaggctctaaattctgcctcattttctatgtgcagcagttccccatatctgtccaagtttaaaagcctgttccacaacagagagtcctccagagtgagcatatagtacatgcgtgttctgtaattcttcagtgacatagttctcatcagagaataacaaactatcttgttcctgtgattattaatgttttatttatttattttttagcaacagaaaattcaaggaactccaacaaagaaaaacaaatcaaaaaaattggatccactcagaggccagaaggttattgcaagatgtgatgaaaatggcttttattttccaggtaggtagatattttactttgtaaaattcctttgttaagtaatacgatatcggggaccagaagttctcaaactgtgctttccctatcactttgacacctcataagccgtactaaggtattccacttctaaaatgaaaggatgatgaggtttctacccatatttgtggagaagtaatcgccagaaaaacttacattaatctttcatttgtttagtaaacaagttttttattacatatttactatgttccatgtatgtaatattcctaaagtgctggtctaacacagtaagcaaacagaagaaaattcttgtctttatggagcttacatgctagtgggggagtcagacagcagctgaataagtaaaatatgtagtgtgtcagatccagggctatgaaggaaaatggagccacgaagagaattgagcacatcaaaggtgaaggttgcaattctaagtatggtggtcgatgaagagcttatgggtaaggtgatatattaatcaggactttcaaaaggagcaagaagggatttcctggtagtccatcagttaagactccaggcttccactgtagggggcatagatttgaaccctggtcaggaagctaagttcccacatagtgtgtggcacagccaaaaaatttaaaaaataaaatttaaaaataaattaattaaaaggggccatgagattatctgggggagagagttctagcaagggaagaccagggcttcactagaagcttcactagaagccctgagaatggaacgcctatgacatcctcttccttagagggagaggcaaatgtgtctgggacatgatgaatcgcagatgcaccatgagacactaacgttgtcagagacgcagttggagatatggatctagagtctggagaggaaatctgtccagagacagaaatttttgacacgtcagcacaaaaagtactcattgaaatcatgtaaaagcctatggggaaagagagcttaaagaacccagaagaagagatgtcagtcgaaaagattataccttgaagtgtagtcaatcctactcccagtcacctttttaaaaaaattatttattacatttaattaaatctgctttttaagtgggaaaagtacttaaataggaatttgggtttctagcagacatatgtgtagaactaacaactaggatattgtatttgaatttttttaccccttccaaaaaggaaggccagatagaattttgaggagcacaggcatgatcttcattggtgactcctttctgataatatttgttcaaagcctcataaatgtttctagagaaaaacagctaagcagaaggcagcttcagagcaattggatcaaagcgtcctttgcttaaggccaggtctgtgcaggagcaaagctggctcagttcttgctgccacccttgggaatcagggcagggatttccatttggctacctctgttccaaagaattgatgctttcaaattgtggtgttggagaagactcttgagagtcccttggacagcaaggagatcaaaccagtcaatcctaaaggaaatcagtcctttattcatagaatattcattggaagaattgatgctgaagctccaatactttggccagctgatgcaaagagctgactcattggaaaagaccttgatgctgggaaagattgagggcaggaggaaaagggggtggcagaggactagatggttggatagtatcactgactcaatgaacatgagtttaagcaaactccaggaggtagtgaagaacagggaagcctggcatgctgcagtccctggggtcacaaatagtcggacacgaccaagtgactgaacaacaaccaccacctttgctccagggatcagtgtggattagctagtggaggtcagactgtgttgtgcagaacagaagtgacaagctgatagcctggttcatccggatgctgaaaatcaggaaggcggacacatttcagaactttattttaatcattatttgtaggaactgtgtcatctttcctgttgttcagtaaaaagcagcattttatctcaggaagtcctcaatgatgaaaagtctgggttgcaagatttctgcactatgccatcagaacaagttacaacaggaaaaaaaaaaaaaaaagctgggggtgggaaacagaatactttctcaggtgtaatgatttaggaccagaaaaat

SEQ ID NO: 64885 - DNA, 640 bp, Bovine  19866881010630
  misc_feature (1)..(1): n is a, c, g, or t
ntgtcttcttattggccccaggtagtcgaaccagcggatcacccgtgtctccaagtccttggtcaccttgcggaactgcatgtactgcttgatggaatcgatcttggcctggaactcggcccgtgaagcattcatgtttgagatcatggagcccacgttgcccacgatggtggcaaaaatcaggacgcccaccaggaagtcgatgaccacaaagagatattcctcgtcttttacggggggcggggtctccccaatggtggtcagggtcaaggtggaccagtagagactgtaaatgtactttctggagaggcgcccgtactctgggttggagacgtttgggtagacccaggagtcggtcccgaaaccaatgaacttggaaatggcaaagtagatgcaggcattccagtggatgatgatgaggatgtacaagaccaagttcccgattctgaacatgttggggtagttggtcctcgtctccgtgcggtcaaagaattcgaagagccgggccaacttcaggaggcggttgaacctcagttctgggtagttcatgcccagcttaaaataagccaggtctgtgggcaccagggacaacacgtccagcttgaagtgcaaggtctgtgtgtagtgcttccacagccgg

SEQ ID NO: 64886 - DNA, 972 bp, Bovine  19866880517373
  misc_feature (1)..(1): n is a, c, g, or t
nttcagctgaaatagcctgcctttctgtactccaggtgtgtacagcacatttgctttcttggcagaatgtaatttggttcaaaatgtaattcgccttggaatcaagtgttcaaaattcccctataatttttgatgcggttcaaaattttctccttcaacaatttttatgtgactcccccatttaaagtctagatcacttttagggagcagtaagaaaattcacaaacaagatatagcttattctttgaaattatattttgttttgcttctctattaatgcaaccaaaaagatttcaagttaataatcatcaggtttgtatttgatttatattgttataaggtgttaaatccagtacttaaataatcatcacattgtgatgtttacaagccagtttttcctcccaaactcttttatctagaagtgaacattttaaaatatggccctagagatcaaagtgcccattcttacttattttattagatccagatatgttgcctttatcctttaaaaagcactgactttccatttaattcagttttactcctctttaaatgtgtgattctctaccttaaataacctcgggatgttttcctagaaatgcagtcaaccatctgaaagtaatttttctgtctggtatgtggggagtttgatgggtgtatgtgacatgcttataacttaacattccttactatactcattttcatcaaaatattggctaaaatattcagaacagatgtgtatttgtgtgtgcgtgtatttttctagagaaagcttcttttgtgagcaattaaaaggtacatcagacataaagagaaatttctctgcagccttttttcccccagttctttggcaactgtaatagagaagattacttctcagatgctgtatatcatcctgaaacgtaatgattttagcatgttggggccagagttttaaaaatgtaggggagggatacgactaaaaaggcagca

SEQ ID NO: 64887 - DNA, 600 bp, Bovine  MMBT19771
tctaattgtgtaattttctgcaactactctgggacaaaaatcttggtaattggatttttttaaackaacaagttgtcacaattggatagttcttaaactatttgtgcttatgcttcagaaattttcagtggatgtacagtgtattttaaatgttttgcatcagcttgtggtctcaaatttgatttaactttgaattttaaaatagattgacaactctgattatacattgtcttcactaaatggacctttgctaagttttgagtgtrttcatccctaccccactctctgctgttgtcatgsgagctaaaatcctggcggattcagctccacccccaagtggttctgtctcccagagtgctttgctgttactatggaaatgcctgcttattaatcttgctgtccttttactaccaaagcacctttaacygtctcaagcaatcaagtgacgttacctacagcaggcaaaggaagaagaagactgctttcgcatcctacaactgcaatgctgattttaatcaagatttaatcaaggagcagaaggaactaaagctactccaacagctctttaaaaatatacaaagctggatctttctgatgcat

SEQ ID NO: 64888 - DNA, 600 bp, Bovine  MMBT08985
ctctgcaccctgactttcctgtcaagtagtttataataacagctaacatttatggagtgtttgcaatgcactgggcttcatgccaagcgctttacacaccttgtcttaattaatcctcccagctaccccccaaggtgtacatatcattacctccactctcctagtggaaactgaggctcagagaagctaagatcaccccccctagaaagtggcagggccaggatatgaaaactgcgcttaaccaccatgctcttctacttcccccctctaatctgaaaagaaacccttaggtttggggcwtctttgtttatagactgaagccccgtatcttttttaaagactttttttgatgtggatcatttttaaagtcttgattgaatatgttacaatattgtttctgtttaatgttttggttttttggccgtgagacatgttggatgtcagctccccagcgagggatcgaacctgcaccccctgcagggtgaagtctcagccgctggaccaccagggaagcccctgaaggcccctattgtaatgtgtatactgtccccatgacttagatgctttgcaagttcagattttttatattcttttgttcag

SEQ ID NO: 64889 - DNA, 600 bp, Bovine  MMBT21228
cttctttcccccattccacgtgtaggcacagaggcctttaagcagcaccacttgtacctgagaagccccaagaagctgagctggcaggagagctccaccatctggtgctaaaaaaagtcctgaggttcataaccaccatccggttcttggcctttacatagccacctctcgctgaggtcagggaccactgagcagcggctgctaccagaaaaccacagccatttctccccatggggtcattcacttgactcatgtgctaatcatctgctctgcattcaggcctgtgaccacaggctcttkmtaaggttgcccaggtgtcctagtcctgacttcacctctgatttggtgtgtgcccttccctagctgttgcctccatatgtccstgtggatgaagcgggggtgcagcgggggaggggggctgtatgatttgcgagggctstgccattctgcttctccctgtggaggtggtctgtacctaaaggatgacctccagaaaaagccctgacacaacatgtatttcccttcccttctgaaattgctgacttaagactcttcctctttggcaaaggtgccaggtagcaggctcagaggcacagattc

SEQ ID NO: 64890 - DNA, 600 bp, Bovine  MMBT12147
catacatgcatgtgtgtgcagtcacttcagtcatatctgactctgtaatcccatggactgtagcccaccagtctcctctgtctacgagatttcccaagcaagaatactggagtgggttgccatttcctcctccaggagatcttcccracctagggattgaactcacatctcttacagctcctgcattggcagacagatactttaccactgagccacctgggaagccccctacattccatacatatttggttcaaactgcacatagcggccatttctaattactattacttaataaaaaayacttttataattatgcattaacttcccaatcatgattacagtcactggtactgagcaagaacattaaaaatccaagactaggccctggagtcctgattagaattgtacagataaacttacaggttggagagcagacacaagccaagtctgtgtgccatattttaatggaagtttgcagtaatccatgcgagaatgaccaatatttctcaagttcttctggaactaatggtctattgcattttgtatttagagttatcctaaatcatacatttggggtatgccagtgcaaatataaaatgt

SEQ ID NO: 64891 - DNA, 600 bp, Bovine  MMBT00059
tccctaccccagtacctcagaatgtgactatacttggccacagggtctttaaagaggtaacagggtaaaataaggtcattaaggtgagctctaagccaaaacctctaaagcgcttataagaagagatgagaacacaacccacaggtaacatacagggaggaggccgcctacggccaaggaaagacgtctccatcaaaggagataaggttcgtaggtcgggaacacacacatgctactcttctctgctcctgtggttctcccccacagaaccttaagttggcctcagaaacctcaaggaartacttcaagctgccactatcaaccaaccagggttgacaggtgagctaatcaaatgacaggagagcttcctgcttcgatgcccggatgacccactgggcttcactaaaccccagctccatgtggacccactccttcctgaggcctccgtctccccgtccgtgagacgctgtctacagcccctgcacgtacctccgtgaacttgtcggccaccatgtaacggacgcgccaggacttgtcctcagcagcctggcgcagggtgggcatcaccagggcctccaggtcctcctggggcaggagctg

SEQ ID NO: 64892 - DNA, 600 bp, Bovine  MMBT03692
cttctcatgcaagtaagataaacagaaaatattgtctgaagttactaatccaggtttcattgaataccttgtttaggtagagcagaaagtatgaagaaaaaaagacaagtgtaatggtcatactcaattctagtgtttctaatgactgagtcaaatatgtaacaatttatttgtgtgtttgtaatatttttaaaagttcattctgatgacctttcaatattcttaaatttatcaagtctaagagacaagaagtaaaggtgattgttagactaataattctcttatctataaaaaggattrtttccatgagttcattctcatcttttaagaaatggaatatattttgaagtgtttaaagtaactattccttcaagatcacccaaatctactcctaatcacaatttaattaattttagctaacacatgactggaggtgtaggtacttagattattcaagtctccacagtcagccatgttttccagtggctgctgatcatgacatcaggccctggtaagacctccattttggccattttcattattgatgtaggttacatcagactaacagtggctgaatatcagctgttaggctggcgaaga

SEQ ID NO: 64893 - DNA, 600 bp, Bovine   MMBT01127
gggttaaatgagagattggagacagctttgtagcctattgaaacaaagtatgccctcaacaaacagttactgattgattggtcaagtctatcagacactggatacatttaaagcacatgataaaaaatgtacagttttctgaatttgttataagttctgctgaatctgtcacatttgataaattggtcataaatgactattatctgtgaacatttgtatgaattcaccatgttttttatttagctctgtaaaaagaatattataatgctaactgccagtaactattagttgaagaatacmtcctttgagcagttcagtgcttggcatgtggtagagcagcacttagtaagtgtttgttgagtcaaagaacaaattattaacaacttctaatcaaggcctttgattcttcagcaattaaatctctttattctcattttttactttatggagaaatgctgaccaatatgatttaagtcacatacataattttatgtttttcagtatccacgtttgaaaaagtaaaaagaaacagctgaaattaattttaataatgtattttatttaasccatgtcaatatattatggttttgatatataatc

SEQ ID NO: 64894 - DNA, 600 bp, Bovine  MMBT14000
aactgtcctgggttagggaatccctgagcaatagtcaattaggaacagagcgctcgcctctaagtttagtactgagtcatctgcagaccctgctaaagacgtgaaaagataaagagggtaggagaggaaggagggagggagaggaagggagagacagagggaaacagggacagacacagagaaatatccctggtcaccatcaacagttacggaacttcccacagtcccactccctccaccgatgctcactgctcagggctgccctgagggtcacgtgccccgtttaaagcggaggaytgrggcttgcagaggtgccccggatcagcccggccgccgccagcgcccckcaagrgggggcccggatacgcccgcgaccccggacgaaagaagcctgcccgccccccgggcccgcacacctcctccttccgcgagcgcttggacactttcttctccatcttagcggccgtcttctccgccccgcggcccttcttctctttcttgccctttttgcccatcgcgccggatccaaggaggcttctgarccgcctgtgagactctagcggcgcgccgcgcgcggcgcgcaggaaatacgtgctgggg

SEQ ID NO: 64895 - DNA, 600 bp, Bovine  MMBT21665
tctttttgcatttattcttttcttcccttttaaaaaataactttatttatttacttatttttgtctgctaggtctgcattgctgctcaggcttttccccagttgtggcaagtgagggctgttctctggtttcagggtgggcttctcactgccgtggcttctcactgcagtggcttctcgtgtggagtatgggccgtagggcacatgggctttggtagttacaccctggggctctagagcacaygctcaatatttgtggcaaatggcatacgggatcttstcagatcagggatcaaacccrtgtctcatcaccacagtaagcctaacatccatccgcatacatggttgcaatyattttttcctagtgatgagaacttttaagatctattctcttggcacggcattcttaaagtgcttattttttccacttaaaaaaaatccaagttggaagcagcatgttatattaagagattctgcatgtaatatgggcatcttaaatttaccatgaaactgaattttttgccttagagatgcagaagctagaataatggatattataattcatgctcagtgatgcttcagacaacaaatgtgacctgtt

SEQ ID NO: 64896 - DNA, 24 bp, Artificial sequence
  Primer
taaatggacctttgctaagttttg

SEQ ID NO: 64897 - DNA, 21 bp, Artificial sequence
  Primer
ttctacttcccccctctaatc

SEQ ID NO: 64898 - DNA, 21 bp, Artificial sequence
  Primer
atggggtcattcacttgactc

SEQ ID NO: 64899 - DNA, 18 bp, Artificial sequence
  Primer
actgcacatagcggccat

SEQ ID NO: 64900 - DNA, 18 bp, Artificial sequence
  Primer
ttctcccccacagaacct

SEQ ID NO: 64901 - DNA, 28 bp, Artificial sequence
  Primer
acaagaagtaaaggtgattgttagacta

SEQ ID NO: 64902 - DNA, 32 bp, Artificial sequence
  Primer
tagctctgtaaaaagaatattataatgctaac

SEQ ID NO: 64903 - DNA, 18 bp, Artificial sequence
  Primer
accgatgctcactgctca

SEQ ID NO: 64904 - DNA, 18 bp, Artificial sequence
  Primer
tgtggcaaatggcatacg

SEQ ID NO: 64905 - DNA, 18 bp, Artificial sequence
  Primer
agaaccacttgggggtgg

SEQ ID NO: 64906 - DNA, 26 bp, Artificial sequence
  Primer
aaaaaagtctttaaaaaagatacggg

SEQ ID NO: 64907 - DNA, 21 bp, Artificial sequence
  Primer
acacaccaaatcagaggtgaa

SEQ ID NO: 64908 - DNA, 25 bp, Artificial sequence
  Primer
tcagtaccagtgactgtaatcatga

SEQ ID NO: 64909 - DNA, 23 bp, Artificial sequence
  Primer
atttgattagctcacctgtcaac

SEQ ID NO: 64910 - DNA, 30 bp, Artificial sequence
  Primer
atcttgaaggaatagttactttaaacactt

SEQ ID NO: 64911 - DNA, 21 bp, Artificial sequence
  Primer
taagtgctgctctaccacatg

SEQ ID NO: 64912 - DNA, 18 bp, Artificial sequence
  Primer
ttctttcgtccggggtcg

SEQ ID NO: 64913 - DNA, 19 bp, Artificial sequence
  Primer
catgtatgcggatggatgt

SEQ ID NO: 64914 - DNA, 45 bp, Artificial sequence
  Primer
ggatggcgttccgtcctatttaccccactctctgctgttgtcatg

SEQ ID NO: 64915 - DNA, 45 bp, Artificial sequence
  Primer
acgcacgtccacggtgatttgaaaagaaacccttaggtttggggc

SEQ ID NO: 64916 - DNA, 45 bp, Artificial sequence
  Primer
agatagagtcgatgccagctttcaggcctgtgaccacaggctctt

SEQ ID NO: 64917 - DNA, 45 bp, Artificial sequence
  Primer
agggtctctacgctgacgatctaattactattacttaataaaaaa

SEQ ID NO: 64918 - DNA, 45 bp, Artificial sequence
  Primer
agggtctctacgctgacgatagttggcctcagaaacctcaaggaa

SEQ ID NO: 64919 - DNA, 45 bp, Artificial sequence
  Primer
cgtgccgctcgtgatagaataattctcttatctataaaaaggatt

SEQ ID NO: 64920 - DNA, 45 bp, Artificial sequence
  Primer
gcggtaggttcccgacatatccagtaactattagttgaagaatac

SEQ ID NO: 64921 - DNA, 45 bp, Artificial sequence
  Primer
ggatggcgttccgtcctattgtgccccgtttaaagcggaggaytg

SEQ ID NO: 64922 - DNA, 45 bp, Artificial sequence
  Primer
agagcgagtgacgcatactattaggcttactgtggtgatgagaca

SEQ ID NO: 64923 - DNA, 600 bp, Bovine MMBT25471
gatctcaaagcagggattcactgtgcccctcctcccccagctgtggcagtttggtgagtgggtggatgtggtggtggatgacctgctgcccaccaaggacgggaagctggtgtttgtgcactctgcccaaggcaacgagttctggagcgccctgctggagaaggcctatgccaagtgagtgggggcccagggacagctccaggccacgcctgggttgggggtcctgcttggtgcagaatggtgacctgggccgcccacagggtgaacggcagctacgaggccctctcaggaggcagcacrtctgagggctttgaggacttcaccggyggagtcaccgagtggtacgagctgcgcaaggcgcccagcgacctctacaacatcatcctcaaggccctggagcgtggctccctgctgggytgctccatcgatgtaagtgcctcccccatcctgggacctgagtctcctagcggttccttctctctactcagcccagcctcagacttgccacgggcttggctccagaccctgtcctttgcctcacaccatccctggatcctcagccagcctggctcatcacctcagtcctgtcctccacctcca

SEQ ID NO: 64924 - DNA, 600 bp, Bovine CAPN1x9
tcccacagtggactcaggcttgaacagaggggcccatctgcgtgtgacygggtctggggactgccctggcaaagctcaggctgtgcgtgcaggcggctgtgcccacctaccagcatcctcggggcgtctgagctggccctcataagataacccctgggactggggtctctggacttgcccttgtggaggcctcctgacctgggccagggaaggacaggccccagggatagaggctgggcaggtcagtggccgccagcccctggcagtgccsttttcctrcagctcctcggagtggaacgscgtggacccttacatgcgggagcagctccgggtcaagatggaggatggggagttctggtgagcagccccctcctcagtctgagtgggcaccccagctcccaaccccaccccccygaaaaccagctgtgccatgtctcttgatgcctcgactgggcatcctggttcactctcacctcgaccccccaggatgtccttccgagacttcatgcgtgaattcacccgcctggagatctgcaacctgacacccgacgcgctcaagagccagaggttccgcaactggaacaccaccctgtacgaggg

SEQ ID NO: 64925 - DNA, 527 bp, Bovine MMBT25709
ttcatgttaattttaacctttcttctaaacagttatatgtgagacatatggatctgtcaaagactactttaaccactaaaacatataactgtatgggagattttctgttgtaaaatataaagtgctcatttttaaagtgatagaaataagtagaacttgccattaaaaggcaaatccgtgctgtatagctatagataaaatattccattgaaaatggcaatatccagacttggaagtgctttactaggggcaggcaaatgatgccaagttaaatgatgcttagtgtaaaagaaatgaatwgaagaccagaggctggcataaatgtggtaactggatttattacaagtttcatggaaaattcaaggtggtagatgctggcagaggacagagcctactgcaatagtttaggatagaaaaaagtaaaagcaaaaatggtaaatgtaacaaaccgtataaatatttacttggtctcctttcttctcttagccacaaaatcacatacagtggtaattaaataatgcaggtct
